(19) United States
(12) Patent Application Publication
(10) Pub. No.: US 2025/0242056 A1
(43) Pub. Date: Jul. 31, 2025

(54) METHODS AND COMPOSITIONS FOR USING PLASMA CELL DEPLETING AGENTS AND/OR B CELL DEPLETING AGENTS TO SUPPRESS HOST ANTI-AAV ANTIBODY RESPONSE AND ENABLE AAV TRANSDUCTION AND RE-DOSING

(71) Applicant: Regeneron Pharmaceuticals, Inc., Tarrytown, NY (US)

(72) Inventors: Nicholas Giovannone, Elmsford, NY (US); Andre Limnander, New York, NY (US); Andrew Baik, Scarsdale, NY (US); Katherine Cygnar, New York, NY (US); Christos Kyratsous, Irvington, NY (US)

(21) Appl. No.: 19/036,194

(22) Filed: Jan. 24, 2025

Related U.S. Application Data
(60) Provisional application No. 63/639,285, filed on Apr. 26, 2024.
(60) Provisional application No. 63/625,654, filed on Jan. 26, 2024.

(51) Int. Cl. A61K 48/00; A61K 9/1271; A61K 9/51; A61K 38/37; A61K 38/47; A61K 38/48; A61K 39/00; C07K 16/28; C12N 9/22; C12N 15/11; C12N 15/86; C12N 15/88

(52) U.S. Cl. CPC A61K 48/005; A61K 9/1271; A61K 9/5123; A61K 38/37; A61K 38/47; A61K 38/4846; A61K 48/0083; C07K 16/2809; C07K 16/2878; C07K 16/2881; C07K 16/2887; C07K 16/2896; C12N 9/22; C12N 15/111; C12N 15/86; C12N 15/88; C12Y 302/0102; C12Y 304/21022; A61K 2039/505; C07K 2317/31; C07K 2317/52; C07K 2317/565; C12N 2310/20; C12N 2750/14143; C12N 2830/50

(57) ABSTRACT

Provided herein are methods of inserting a nucleic acid encoding a polypeptide of interest into a target genomic locus in a cell or a population of cells in a subject, methods of expressing a polypeptide of interest from a target genomic locus in a cell or a population of cells in a subject, methods of treating an enzyme deficiency in a subject in need thereof, and methods of preventing or reducing the onset of a sign or symptom of an enzyme deficiency in a subject in need thereof. Some methods, such as when a subject has preexisting against an immunogen to be administered, use plasma cell depleting agents or combinations comprising plasma cell depleting agents to mitigate immune response and facilitate redosing of nucleic acid constructs encoding a polypeptide of interest and nuclease agents targeting a target genomic locus to achieve, for example, a step-wise increase in expression of a polypeptide of interest in a subject following insertion of the nucleic acid construct without overshooting. Other methods, such as when a subject has no preexisting immunity against an immunogen to be administered, use B cell depleting agents (e.g., anti-CD20×CD3 antibody or functional fragment thereof) to mitigate immune response and facilitate redosing of nucleic acid constructs encoding a polypeptide of interest and nuclease agents targeting a target genomic locus to achieve, for example, a step-wise increase in expression of a polypeptide of interest in a subject following insertion of the nucleic acid construct without overshooting.

### CROSS-REFERENCE TO RELATED APPLICATIONS

[0001] This application claims the benefit of U.S. Application No. 63/625,654, filed Jan. 26, 2024, and U.S. Application No. 63/639,285, filed Apr. 26, 2024, each of which is herein incorporated by reference in its entirety for all purposes.

### REFERENCE TO A SEQUENCE LISTING SUBMITTED AS AN XML FILE

[0002] The Sequence Listing written in file 624866SEQLIST.xml is 1,816,797 bytes, was created on Jan. 21, 2025, and is hereby incorporated by reference in its entirety.

### BACKGROUND

[0003] Adeno-associated virus (AAV)-based vectors hold tremendous promise to transform treatment of genetic diseases. Yet, the potential of AAV gene therapy has so far been limited by development of host antibodies (e.g., neutralizing antibodies (nAbs)) that block transduction or affect uptake on subsequent exposures. Clinically, the inability to re-dose AAVs presents challenges because efficacy cannot be restored if transgene expression is subtherapeutic or lost (e.g., due to cell division, silencing, or a cytotoxic immune response). Moreover, due to natural AAV exposure, many patients develop nAbs prior to treatment that render them ineligible for even a single dose. Therefore, strategies that prevent or attenuate anti-AAV nAb responses could vastly expand the utility and accessibility of existing AAV gene therapies, while safeguarding eligibility for future AAV-based advances.

[0004] Similarly, in AAV gene therapies, seronegative/naive patients can be dosed with AAV and develop antibody responses to the AAV capsid antigen. This antibody response prevents future re-dosing of AAV because the antibodies are neutralizing, and the antibody response is sustained for 10+ years.

### SUMMARY

[0005] Provided herein are methods of inserting a nucleic acid encoding a polypeptide of interest into a target genomic locus in a cell or a population of cells in a subject, methods of expressing a polypeptide of interest from a target genomic locus in a cell or a population of cells in a subject, methods of treating an enzyme deficiency in a subject in need thereof, and methods of preventing or reducing the onset of a sign or symptom of an enzyme deficiency in a subject in need thereof. Also provided are compositions, combination, or kits, e.g., for use in such methods.

[0006] In one aspect, provided are methods of inserting a nucleic acid encoding a polypeptide of interest into a target genomic locus in a cell or a population of cells in a subject, comprising administering to the subject: (a) a nucleic acid construct comprising a coding sequence for the polypeptide of interest; (b) a nuclease agent or one or more nucleic acids encoding the nuclease agent, wherein the nuclease agent targets a nuclease target site in the target genomic locus; and (c) an effective amount of a plasma cell depleting agent, wherein the nuclease agent cleaves the nuclease target site, and the nucleic acid construct is inserted into the target genomic locus. In some such methods, provided are methods of inserting a nucleic acid encoding a polypeptide of interest into a target genomic locus in a cell or a population of cells in a subject, comprising administering to the subject: (a) a nucleic acid construct comprising a coding sequence for the polypeptide of interest; (b) a nuclease agent or one or more nucleic acids encoding the nuclease agent, wherein the nuclease agent targets a nuclease target site in the target genomic locus; and (c) an effective amount of a plasma cell depleting agent, wherein the subject has preexisting immunity to the nucleic acid construct, the polypeptide of interest, the nuclease agent, the one or more nucleic acids encoding the nuclease agent, or a delivery vehicle for the nucleic acid construct, the nuclease agent, or the one or more nucleic acids encoding the nuclease agent, and wherein the nuclease agent cleaves the nuclease target site, and the nucleic acid construct is inserted into the target genomic locus.

[0007] In another aspect, provided are methods of expressing a polypeptide of interest from a target genomic locus in a cell or a population of cells in a subject, comprising administering to the subject: (a) a nucleic acid construct comprising a coding sequence for the polypeptide of interest; (b) a nuclease agent or one or more nucleic acids encoding the nuclease agent, wherein the nuclease agent targets a nuclease target site in the target genomic locus; and (c) an effective amount of a plasma cell depleting agent, wherein the nuclease agent cleaves the nuclease target site, the nucleic acid construct is inserted into the target genomic locus to create a modified target genomic locus, and the polypeptide of interest is expressed from the modified target genomic locus. In some such methods, provided are methods of expressing a polypeptide of interest from a target genomic locus in a cell or a population of cells in a subject, comprising administering to the subject: (a) a nucleic acid construct comprising a coding sequence for the polypeptide of interest; (b) a nuclease agent or one or more nucleic acids encoding the nuclease agent, wherein the nuclease agent targets a nuclease target site in the target genomic locus; and (c) an effective amount of a plasma cell depleting agent, wherein the subject has preexisting immunity to the nucleic acid construct, the polypeptide of interest, the nuclease agent, the one or more nucleic acids encoding the nuclease agent, or a delivery vehicle for the nucleic acid construct, the nuclease agent, or the one or more nucleic acids encoding the nuclease agent, and wherein the nuclease agent cleaves the nuclease target site, the nucleic acid construct is inserted into the target genomic locus to create a modified target genomic locus, and the polypeptide of interest is expressed from the modified target genomic locus.

[0008] In another aspect, provided are methods of treating an enzyme deficiency in a subject in need thereof, comprising administering to the subject: (a) a nucleic acid construct comprising a coding sequence for a polypeptide of interest, wherein the polypeptide of interest comprises an enzyme to treat the enzyme deficiency; (b) a nuclease agent or one or more nucleic acids encoding the nuclease agent, wherein the nuclease agent targets a nuclease target site in a target genomic locus; and (c) an effective amount of a plasma cell depleting agent, wherein the nuclease agent cleaves the nuclease target site, the nucleic acid construct is inserted into the target genomic locus to create a modified target genomic locus, and the polypeptide of interest is expressed from the modified target genomic locus, thereby treating the enzyme deficiency. In some such methods, provided are methods of treating an enzyme deficiency in a subject in need thereof, comprising administering to the subject: (a) a nucleic acid construct comprising a coding sequence for a polypeptide of interest, wherein the polypeptide of interest comprises an enzyme to treat the enzyme deficiency; (b) a nuclease agent or one or more nucleic acids encoding the nuclease agent, wherein the nuclease agent targets a nuclease target site in a target genomic locus; and (c) an effective amount of a plasma cell depleting agent, wherein the subject has preexisting immunity to the nucleic acid construct, the polypeptide of interest, the nuclease agent, the one or more nucleic acids encoding the nuclease agent, or a delivery vehicle for the nucleic acid construct, the nuclease agent, or the one or more nucleic acids encoding the nuclease agent, and wherein the nuclease agent cleaves the nuclease target site, the nucleic acid construct is inserted into the target genomic locus to create a modified target genomic locus, and the polypeptide of interest is expressed from the modified target genomic locus, thereby treating the enzyme deficiency.

[0009] In another aspect, provided are methods of preventing or reducing the onset of a sign or symptom of an enzyme deficiency in a subject in need thereof, comprising administering to the subject: (a) a nucleic acid construct comprising a coding sequence for a polypeptide of interest, wherein the enzyme deficiency is characterized by a loss-of-function of the polypeptide of interest; (b) a nuclease agent or one or more nucleic acids encoding the nuclease agent, wherein the nuclease agent targets a nuclease target site in a target genomic locus; and (c) an effective amount of a plasma cell depleting agent, wherein the nuclease agent cleaves the nuclease target site, the nucleic acid construct is inserted into the target genomic locus to create a modified target genomic locus, and the polypeptide of interest is expressed from the modified target genomic locus, thereby preventing or reducing the onset of the sign or symptom of the enzyme deficiency. In some such methods, provided are methods of preventing or reducing the onset of a sign or symptom of an enzyme deficiency in a subject in need thereof, comprising administering to the subject: (a) a nucleic acid construct comprising a coding sequence for a polypeptide of interest, wherein the enzyme deficiency is characterized by a loss-of-function of the polypeptide of interest; (b) a nuclease agent or one or more nucleic acids encoding the nuclease agent, wherein the nuclease agent targets a nuclease target site in a target genomic locus; and (c) an effective amount of a plasma cell depleting agent, wherein the subject has preexisting immunity to the nucleic acid construct, the polypeptide of interest, the nuclease agent, the one or more nucleic acids encoding the nuclease agent, or a delivery vehicle for the nucleic acid construct, the nuclease agent, or the one or more nucleic acids encoding the nuclease agent, and wherein the nuclease agent cleaves the nuclease target site, the nucleic acid construct is inserted into the target genomic locus to create a modified target genomic locus, and the polypeptide of interest is expressed from the modified target genomic locus, thereby preventing or reducing the onset of the sign or symptom of the enzyme deficiency.

[0010] In some such methods, the subject has a disease of a bleeding disorder characterized by the enzyme deficiency, a disease of an inborn error of metabolism characterized by the enzyme deficiency, or a lysosomal storage disease characterized by the enzyme deficiency. Optionally, the disease is hemophilia B and the polypeptide of interest is a factor IX protein, the disease is hemophilia A and the polypeptide of interest is a factor VIII protein, or the disease is Pompe disease and the polypeptide of interest is a multidomain therapeutic protein comprising a delivery domain fused to a lysosomal alpha-glucosidase.

[0011] Some such methods further comprise a subsequent administration step comprising administering to the subject at one or more subsequent times: (a) the nucleic acid construct; (b) the nuclease agent or the one or more nucleic acids encoding the nuclease agent; and optionally (c) the plasma cell depleting agent, until a desired level of expression and/or activity of the polypeptide of interest is achieved in the subject. Some such methods further comprise a subsequent administration step comprising administering to the subject at one or more subsequent times: (a) the nucleic acid construct; (b) a second nuclease agent or one or more nucleic acids encoding the second nuclease agent, wherein the second nuclease agent targets a second nuclease target site in the target genomic locus, wherein the second nuclease target site is different from the first nuclease target site; and optionally (c) the plasma cell depleting agent, until a desired level of expression and/or activity of the polypeptide of interest is achieved in the subject. Some such methods further comprise a subsequent administration step comprising administering to the subject at one or more subsequent times: (a) the nucleic acid construct; (b) a second nuclease agent or one or more nucleic acids encoding the second nuclease agent, wherein the second nuclease agent targets a second nuclease target site in a second target genomic locus that is different from the first target genomic locus; and optionally (c) the plasma cell depleting agent, until a desired level of expression and/or activity of the polypeptide of interest is achieved in the subject. Some such methods further comprise a subsequent administration step comprising administering to the subject at one or more subsequent times: (a) a second nucleic acid construct comprising a second coding sequence for the polypeptide of interest, wherein the second coding sequence is different from the first coding sequence; (b) (i) the first nuclease agent or the one or more nucleic acids encoding the first nuclease agent; (ii) a second nuclease agent or one or more nucleic acids encoding the second nuclease agent, wherein the second nuclease agent targets a second nuclease target site in the target genomic locus, wherein the second nuclease target site is different from the first nuclease target site; or (iii) a second nuclease agent or one or more nucleic acids encoding the second nuclease agent, wherein the second nuclease agent targets a second nuclease target site in a second target genomic locus that is different from the first target genomic locus; and optionally (c) the plasma cell depleting agent, until a desired level of expression and/or activity of the polypeptide of interest is achieved in the subject. Some such methods comprise the following steps prior to the subsequent administration step: (i) measuring expression and/or activity of the polypeptide of interest in the subject; and (ii) determining the dose of the nucleic acid construct and the nuclease agent or the one or more nucleic acids encoding the nuclease agent for the subsequent administration step in order to achieve the desired level of expression and/or activity of the polypeptide of interest is achieved in the subject.

[0012] In some such methods, the polypeptide of interest is a factor IX protein, and the desired expression level of the factor IX protein in the subject is a serum level of at least about 3 μg/mL or about 3-5 μg/mL. In some such methods, the polypeptide of interest is a multidomain therapeutic protein comprising a delivery domain fused to a lysosomal alpha-glucosidase, and the desired expression level of the multidomain therapeutic protein in the subject is a serum level of at least about 2 μg/mL or at least about 5 μg/mL.

[0013] Some such methods further comprise a subsequent administration step comprising administering to the subject at one or more subsequent times: (a) a second nucleic acid construct comprising a coding sequence for a second polypeptide of interest that is different from the first polypeptide of interest; (b) (i) the first nuclease agent or the one or more nucleic acids encoding the first nuclease agent; (ii) a second nuclease agent or one or more nucleic acids encoding the second nuclease agent, wherein the second nuclease agent targets a second nuclease target site in the target genomic locus, wherein the second nuclease target site is different from the first nuclease target site; or (iii) a second nuclease agent or one or more nucleic acids encoding the second nuclease agent, wherein the second nuclease agent targets a second nuclease target site in a second target genomic locus that is different from the first target genomic locus; and optionally (c) the plasma cell depleting agent, wherein the second nuclease agent cleaves the second nuclease target site, and the second nucleic acid construct is inserted into the second target genomic locus.

[0014] In some such methods, the one or more subsequent administration steps is one subsequent administration step. In some such methods, the one or more subsequent administration steps is two subsequent administration steps or comprises at least two subsequent administration steps. In some such methods, the plasma cell depleting agent is administered in the one or more subsequent administration steps if there is no preexisting plasma cell depleting agent in the subject or if preexisting plasma cell depleting agent expression and/or activity levels are below a desired threshold level. Optionally, the method comprises measuring the plasma cell depleting agent expression and/or activity levels prior to the one or more subsequent administration steps. In some such methods, the plasma cell depleting agent is capable of depleting long-lived plasma cells (LLPC).

[0015] In some such methods, the plasma cell depleting agent is a B cell maturation antigen (BCMA) targeting agent. In some such methods, the BCMA targeting agent is a chimeric antigen receptor against BCMA or an anti-BCMA antibody or a functional fragment thereof. In some such methods, the anti-BCMA antibody or functional fragment thereof is conjugated to a cytotoxic agent. In some such methods, the anti-BCMA antibody is a multispecific antibody or a functional fragment thereof. In some such methods, the multispecific anti-BCMA antibody or functional fragment thereof targets BCMA and CD3. In some such methods, the multispecific anti-BCMA antibody or functional fragment thereof is anti-BCMA×CD3 bispecific antibody or functional fragment thereof. In some such methods, the multispecific anti-BCMA antibody or functional fragment thereof is anti-BCMA×CD3 bispecific antibody or functional fragment thereof. In some such methods, the anti-BCMA×CD3 bispecific antibody is selected from linvoseltamab (REGN5458), REGN5459, pacanalotamab (AMG420), teclistamab (JNJ-64007957), AMG701, alnuctamab (CC-93269), EM801, EM901, elranatamab (PF-06863135), TNB383B (ABBV-383), and TNB384B.

[0016] In some such methods, the anti-BCMA×CD3 bispecific antibody or functional fragment thereof comprises a first antigen-binding domain that specifically binds to BCMA comprising three heavy chain CDRs (HCDR1, HCDR2 and HCDR3) contained within a heavy chain variable region (HCVR) comprising the amino acid sequence of SEQ ID NO: 2, and three light chain CDRs (LCDR1, LCDR2 and LCDR3) contained within a light chain variable region (LCVR) comprising the amino acid sequence of SEQ ID NO: 18. In some such methods, the first antigen-binding domain that specifically binds to BCMA comprises a HCDR1 comprising the amino acid sequence of SEQ ID NO: 4, a HCDR2 comprising the amino acid sequence of SEQ ID NO: 6, a HCDR3 comprising the amino acid sequence of SEQ ID NO: 8, a LCDR1 comprising the amino acid sequence of SEQ ID NO: 20, a LCDR2 comprising the amino acid sequence of SEQ ID NO: 22, and a LCDR3 comprising the amino acid sequence of SEQ ID NO: 24.

[0017] In some such methods, the anti-BCMA×CD3 bispecific antibody or functional fragment thereof comprises a second antigen-binding domain that specifically binds to CD3 comprising three heavy chain CDRs (HCDR1, HCDR2 and HCDR3) contained within a heavy chain variable region (HCVR) comprising the amino acid sequence selected from the group consisting of SEQ ID NOS: 26 and 34, and three light chain CDRs (LCDR1, LCDR2 and LCDR3) contained within a light chain variable region (LCVR) comprising the amino acid sequence of SEQ ID NO: 18. In some such methods, the second antigen-binding domain that specifically binds to CD3 comprises a HCDR1 comprising the amino acid sequence of SEQ ID NO: 28 or 36, a HCDR2 comprising the amino acid sequence of SEQ ID NO: 30 or 38, a HCDR3 comprising the amino acid sequence of SEQ ID NO: 32 or 40, a LCDR1 comprising the amino acid sequence of SEQ ID NO: 20, a LCDR2 comprising the amino acid sequence of SEQ ID NO: 22, and a LCDR3 comprising the amino acid sequence of SEQ ID NO: 24.

[0018] In some such methods, the anti-BCMA×CD3 bispecific antibody or functional fragment thereof comprises: (a) a first antigen-binding domain that comprises HCDR1, HCDR2, and HCDR3 comprising the amino acid sequences of SEQ ID NOS: 4, 6, and 8, respectively, and LCDR1, LCDR2, and LCDR3 comprising the amino acid sequences of SEQ ID NOS: 20, 22, and 24, respectively; and (b) a second antigen-binding domain that comprises HCDR1, HCDR2, and HCDR3 comprising the amino acid sequences of SEQ ID NOS: 28, 30, and 32, respectively, and LCDR1, LCDR2, and LCDR3 comprising the amino acid sequences of SEQ ID NOS: 20, 22, and 24, respectively. In some such methods, the anti-BCMA×CD3 bispecific antibody or functional fragment thereof comprises: (a) a first antigen-binding domain that comprises HCDR1, HCDR2, and HCDR3 comprising the amino acid sequences of SEQ ID NOS: 4, 6, and 8, respectively, and LCDR1, LCDR2, and LCDR3 comprising the amino acid sequences of SEQ ID NOS: 20, 22, and 24, respectively; and (b) a second antigen-binding domain that comprises HCDR1, HCDR2, and HCDR3 comprising the amino acid sequences of SEQ ID NOS: 36, 38, and 40, respectively, and LCDR1, LCDR2, and LCDR3 comprising the amino acid sequences of SEQ ID NOS: 20, 22, and 24, respectively. In some such methods, the anti-BCMA×CD3 bispecific antibody or functional fragment thereof comprises a human IgG heavy chain constant region, optionally wherein the human IgG heavy chain constant region comprises one or more modifications that increase binding to a neonatal Fc receptor (FcRn) and/or the human IgG heavy chain constant region comprises one or more modifications that decrease binding to an Fc-gamma receptor (FcγR). In some such methods, the human IgG heavy chain constant region is isotype IgG4 or IgG1.

[0019] Some such methods further comprise administering to the subject an effective amount of a B cell depleting agent and/or an immunoglobulin depleting agent. Some such methods further comprise administering to the subject an effective amount of a B cell depleting agent and an immunoglobulin depleting agent. In some such methods, the B cell depleting agent is administered before, at the same time as, or after the plasma cell depleting agent. In some such methods, the B cell depleting agent is administered prior to and after the nucleic acid construct. In some such methods, the immunoglobulin depleting agent is administered prior to and after the nucleic acid construct. In some such methods, the immunoglobulin depleting agent is administered after the plasma cell depleting agent. In some embodiments, the immunoglobulin depleting agent is administered after an initial dose of the plasma cell depleting agent, or wherein the immunoglobulin depleting agent is administered after an initial dose of the plasma cell depleting agent and after an initial dose of the B cell depleting agent. In some such methods, the B cell depleting agent is capable of depleting B cells and plasma cells that express low levels of BCMA. In some such methods, the B cell depleting agent is an agent that binds to a B cell surface molecule. In some such methods, the B cell depleting agent is selected from an anti-CD19 antibody, an anti-CD20 antibody, an anti-CD22 antibody, an anti-CD79 antibody, an anti-CD20×CD3 bispecific antibody, an anti-CD19×CD3 bispecific antibody, an anti-CD22×CD3 bispecific antibody, an anti-CD79×CD3 bispecific antibody, functional fragments of any of said antibodies, and any combinations thereof. In some such methods, the B cell depleting agent is selected from an anti-CD19 antibody, an anti-CD20 antibody, an anti-CD19 antibody and an anti-CD20 antibody, an anti-CD22 antibody, an anti-CD79 antibody, an anti-CD20×CD3 bispecific antibody, an anti-CD19×CD3 bispecific antibody, an anti-CD22×CD3 bispecific antibody, an anti-CD79×CD3 bispecific antibody, functional fragments of any of said antibodies, and any combinations thereof. In some such methods, the B cell depleting agent comprises an anti-CD20 antibody or a functional fragment thereof and an anti-CD19 antibody or a functional fragment thereof.

[0020] In some such methods, the B cell depleting agent is an anti-CD20 antibody or a functional fragment thereof, wherein the anti-CD20 antibody is a multispecific antibody or a functional fragment thereof. In some such methods, the multispecific anti-CD20 antibody or functional fragment thereof targets CD20 and CD3. In some such methods, the multispecific anti-CD20 antibody or functional fragment thereof is anti-CD20×CD3 bispecific antibody or functional fragment thereof.

[0021] In some such methods, the anti-CD20×CD3 bispecific antibody or functional fragment thereof comprises a first antigen-binding domain that specifically binds to CD20 comprising three heavy chain CDRs (HCDR1, HCDR2 and HCDR3) contained within a heavy chain variable region (HCVR) comprising the amino acid sequence of SEQ ID NO: 44, and three light chain CDRs (LCDR1, LCDR2 and LCDR3) contained within a light chain variable region (LCVR) comprising the amino acid sequence of SEQ ID NO: 45. In some such methods, the first antigen-binding domain that specifically binds to CD20 comprises a HCDR1 comprising the amino acid sequence of SEQ ID NO: 47, a HCDR2 comprising the amino acid sequence of SEQ ID NO: 48, a HCDR3 comprising the amino acid sequence of SEQ ID NO: 49, a LCDR1 comprising the amino acid sequence of SEQ ID NO: 50, a LCDR2 comprising the amino acid sequence of SEQ ID NO: 51, and a LCDR3 comprising the amino acid sequence of SEQ ID NO: 52.

[0022] In some such methods, the anti-CD20×CD3 bispecific antibody or functional fragment thereof comprises a second antigen-binding domain that specifically binds to CD3 comprising three heavy chain CDRs (HCDR1, HCDR2 and HCDR3) contained within a heavy chain variable region (HCVR) comprising the amino acid sequence of SEQ ID NO: 46, and three light chain CDRs (LCDR1, LCDR2 and LCDR3) contained within a light chain variable region (LCVR) comprising the amino acid sequence of SEQ ID NO: 45. In some such methods, the second antigen-binding domain that specifically binds to CD3 comprises a HCDR1 comprising the amino acid sequence of SEQ ID NO: 53, a HCDR2 comprising the amino acid sequence of SEQ ID NO: 54, a HCDR3 comprising the amino acid sequence of SEQ ID NO: 55, a LCDR1 comprising the amino acid sequence of SEQ ID NO: 50, a LCDR2 comprising the amino acid sequence of SEQ ID NO: 51, and a LCDR3 comprising the amino acid sequence of SEQ ID NO: 52.

[0023] In some such methods, the anti-CD20×CD3 bispecific antibody or functional fragment thereof comprises: (a) a first antigen-binding domain that comprises HCDR1, HCDR2, and HCDR3 comprising the amino acid sequences of SEQ ID NOS: 47, 48, and 49, respectively, and LCDR1, LCDR2, and LCDR3 comprising the amino acid sequences of SEQ ID NOS: 50, 51, and 52, respectively; and (b) a second antigen-binding domain that comprises HCDR1, HCDR2, and HCDR3 comprising the amino acid sequences of SEQ ID NOS: 53, 54, and 55, respectively, and LCDR1, LCDR2, and LCDR3 comprising the amino acid sequences of SEQ ID NOS: 50, 51, and 52, respectively. In some such methods, the anti-CD20×CD3 bispecific antibody or functional fragment thereof comprises a human IgG heavy chain constant region, optionally wherein the human IgG heavy chain constant region comprises one or more modifications that increase binding to a neonatal Fc receptor (FcRn) and/or the human IgG heavy chain constant region comprises one or more modifications that decrease binding to an Fc-gamma receptor (FcγR). In some such methods, the human IgG heavy chain constant region is isotype IgG4 or IgG1.

[0024] In some such methods, the B cell depleting agent is an agent targeting a B cell survival factor. In some such methods, the B cell depleting agent is a BLyS/BAFF inhibitor, an APRIL inhibitor, a BLyS receptor 3/BAFF receptor inhibitor, or any combination thereof. In some such methods, the immunoglobulin depleting agent is capable of accelerating IgG clearance. In some such methods, the immunoglobulin depleting agent is a neonatal Fc receptor (FcRn) blocker. In some such methods, the FcRn blocker is selected from Efgartigimod (ARGX-113), Rozanolixizumab (UCB7665), Batoclimab (RVT-1401), IMVT-1402, Nipocalimab (M281), Orilanolimab (SYNT001), and any combinations thereof.

[0025] Some such methods, further comprise plasmapheresis, therapeutic plasma exchange, or immunoadsorption. In some such methods, the plasma cell depleting agent is administered simultaneously with the nucleic acid construct. In some such methods, the plasma cell depleting agent is administered prior to the nucleic acid construct. In some such methods, the plasma cell depleting agent is administered prior to and after the nucleic acid construct. In some such methods, the plasma cell depleting agent is administered within about 6 months after the nucleic acid construct. Optionally, the nucleic acid construct is in a viral vector, and the plasma cell depleting agent is administered if the viral vector is still present in the subject. In some such methods, the nucleic acid construct is administered within about 3 months, within about 2 months, within about 7 weeks, within about 6 weeks, within about 5 weeks, within about 4 weeks, within about 3 weeks, or within about 2 weeks after an initial dose of the plasma cell depleting agent, or the nucleic acid construct is administered at least about 2 weeks, at least about 3 weeks, at least about 4 weeks, at least about 5 weeks, at least about 6 weeks, at least about 7 weeks, at least about 2 months, or at least about 3 months after an initial dose of the plasma cell depleting agent. In some such methods, the nucleic acid construct is administered about 2 weeks to about 7 weeks, about 3 weeks to about 6 weeks, or about 4 weeks to about 5 weeks after an initial dose of the plasma cell depleting agent. In some such methods, the plasma cell depleting agent is administered about 1 week prior to or within about 1 week prior to the nucleic acid construct. In some such methods, the nucleic acid construct is administered simultaneously with the nuclease agent or the one or more nucleic acids encoding the nuclease agent. In some such methods, the nucleic acid construct is administered prior to or after the nuclease agent or the one or more nucleic acids encoding the nuclease agent.

[0026] In some such methods, the nucleic acid construct is in the nucleic acid vector. Optionally, the nucleic acid vector is a viral vector. Optionally, the viral vector is administered at a dose of about 3E11 vg/kg to about 5E13 vg/kg. In some such methods, the nucleic acid vector is an adeno-associated viral (AAV) vector. Optionally, the nucleic acid construct is flanked by inverted terminal repeats (ITRs) on each end. Optionally, the ITR on at least one end comprises, consists essentially of, or consists of SEQ ID NO: 283. Optionally, the ITR on each end comprises, consists essentially of, or consists of SEQ ID NO: 283. Optionally, the ITR on at least one end comprises, consists essentially of, or consists of SEQ ID NO: 281. Optionally, the ITR on each end comprises, consists essentially of, or consists of SEQ ID NO: 281. In some such methods, the AAV vector is a single-stranded AAV (ssAAV) vector. In some such methods, the AAV vector is a recombinant AAV8 (rAAV8) vector.

[0027] In some such methods, the polypeptide of interest is a factor IX protein. In some such methods, the factor IX protein coding sequence encodes a factor IX protein comprising SEQ ID NO: 97. In some such methods, the factor IX protein coding sequence comprises or consists of SEQ ID NO: 68, or wherein the factor IX protein coding sequence comprises or consists of SEQ ID NO: 61.

[0028] In some such methods, the nucleic acid construct is a bidirectional construct, wherein the factor IX protein coding sequence is a first factor IX protein coding sequence, and the bidirectional construct further comprises a reverse complement of a second factor IX protein coding sequence, wherein the first factor IX protein coding sequence and the second factor IX protein coding sequence are different but encode the same factor IX protein sequence. In some such methods, the nucleic acid construct comprises from 5′ to 3′: a first splice acceptor, the first factor IX protein coding sequence, a first polyadenylation signal, a reverse complement of a second polyadenylation signal, the reverse complement of the second factor IX protein coding sequence, and a reverse complement of a second splice acceptor, wherein: (i) the first factor IX protein coding sequence comprises SEQ ID NO: 61 and the second factor IX protein coding sequence comprises SEQ ID NO: 68; or (ii) the first factor IX protein coding sequence comprises SEQ ID NO: 68 and the second factor IX protein coding sequence comprises SEQ ID NO: 61, wherein the nucleic acid construct does not comprise a promoter that drives the expression of the factor IX protein, and wherein the nucleic acid construct does not comprise homology arms. In some such methods, the nucleic acid construct comprises SEQ ID NO: 109 or 82 or the reverse complement thereof.

[0029] In some such methods, the nucleic acid construct is a unidirectional construct. In some such methods, the nucleic acid construct is a unidirectional construct comprising the factor IX protein coding sequence, wherein the nucleic acid construct comprises from 5′ to 3′: a splice acceptor, the factor IX protein coding sequence, and a polyadenylation signal, wherein the factor IX protein coding sequence comprises SEQ ID NO: 61 or SEQ ID NO: 68, wherein the nucleic acid construct does not comprise a promoter that drives the expression of the factor IX protein, and wherein the nucleic acid construct does not comprise homology arms.

[0030] In some such methods, the polypeptide of interest is a multidomain therapeutic protein comprising a delivery domain fused to a lysosomal alpha-glucosidase. In some such methods, the lysosomal alpha-glucosidase comprises or consists of the sequence set forth in SEQ ID NO: 296. In some such methods, the lysosomal alpha-glucosidase coding sequence comprises or consist of the sequence set forth in SEQ ID NO: 857. In some such methods, the delivery domain is a CD63-binding delivery domain. In some such methods, the CD63-binding delivery domain comprises an anti-CD63 antigen-binding protein. In some such methods, the CD63-binding delivery domain is a single-chain variable fragment (scFv). In some such methods, the scFv comprises or consists of the sequence set forth in SEQ ID NO: 306. In some such methods, the scFv coding sequence comprises or consists of the sequence set forth in SEQ ID NO: 866. In some such methods, the multidomain therapeutic protein comprises or consists of the sequence set forth in SEQ ID NO: 316. In some such methods, the coding sequence for the multidomain therapeutic protein comprises or consists of the sequence set forth in SEQ ID NO: 863. Optionally, the nucleic acid construct comprises the sequence set forth in SEQ ID NO: 900 or 884.

[0031] In some such methods, the nucleic acid construct comprises from 5′ to 3′: a splice acceptor, the coding sequence for the multidomain therapeutic protein, and a polyadenylation signal or sequence, wherein the coding sequence for the multidomain therapeutic protein comprises the sequence set forth in SEQ ID NO: 863, optionally wherein the nucleic acid construct comprises the sequence set forth in SEQ ID NO: 900 or 884, wherein the polyadenylation signal comprises a BGH polyadenylation signal and a unidirectional SV40 late polyadenylation signal, optionally wherein the BGH polyadenylation signal comprises the sequence set forth in SEQ ID NO: 858 and the unidirectional SV40 late polyadenylation signal comprises the sequence set forth in SEQ ID NO: 859, optionally wherein the polyadenylation signal comprising the BGH polyadenylation signal and the unidirectional SV40 late polyadenylation signal comprises the sequence set forth in SEQ ID NO: 902, wherein the nucleic acid construct does not comprise a promoter that drives the expression of the multidomain therapeutic protein, and wherein the nucleic acid construct does not comprise a homology arm.

[0032] In some such methods, the delivery domain is a TfR-binding delivery domain. In some such methods, the TfR-binding delivery domain comprises an anti-TfR antigen-binding protein. In some such methods, the anti-TfR antigen-binding protein comprises a HCVR comprising the HCDR1, HCDR2 and HCDR3 of a HCVR that comprises the amino acid sequence set forth in SEQ ID NO: 555 (or a variant thereof); and a LCVR comprising the LCDR1, LCDR2 and LCDR3 of a LCVR that comprises the amino acid sequence set forth in SEQ ID NO: 560 (or a variant thereof). In some such methods, the anti-TfR antigen-binding protein comprises a HCVR that comprises: an HCDR1 comprising the amino acid sequence set forth in SEQ ID NO: 556 (or a variant thereof), an HCDR2 comprising the amino acid sequence set forth in SEQ ID NO: 557 (or a variant thereof), and an HCDR3 comprising the amino acid sequence set forth in SEQ ID NO: 558 (or a variant thereof); and a LCVR that comprises: an LCDR1 comprising the amino acid sequence set forth in SEQ ID NO: 561 (or a variant thereof), an LCDR2 comprising the amino acid sequence set forth in SEQ ID NO: 562 (or a variant thereof), and an LCDR3 comprising the amino acid sequence set forth in SEQ ID NO: 563 (or a variant thereof). In some such methods, the anti-TfR antigen-binding protein comprises a HCVR that comprises the amino acid sequence set forth in SEQ ID NO: 555 (or a variant thereof); and a LCVR that comprises the amino acid sequence set forth in SEQ ID NO: 560 (or a variant thereof).

[0033] In some such methods, the TfR-binding delivery domain comprises a single-chain variable fragment (scFv). In some such methods, the scFv comprises or consists of the sequence set forth in SEQ ID NO: 672. In some such methods, the scFv coding sequence comprises or consists of the sequence set forth in SEQ ID NO: 713. In some such methods, the multidomain therapeutic protein comprises or consists of the sequence set forth in SEQ ID NO: 691. In some such methods, the coding sequence for the multidomain therapeutic protein comprises or consists of the sequence set forth in SEQ ID NO: 852. Optionally, the nucleic acid construct comprises the sequence set forth in SEQ ID NO: 887 or 871.

[0034] In some such methods, the nucleic acid construct comprises from 5′ to 3′: a splice acceptor, the coding sequence for the multidomain therapeutic protein, and a polyadenylation signal or sequence, wherein the coding sequence for the multidomain therapeutic protein comprises the sequence set forth in SEQ ID NO: 852, optionally wherein the nucleic acid construct comprises the sequence set forth in SEQ ID NO: 887 or 871, wherein the polyadenylation signal comprises a BGH polyadenylation signal and a unidirectional SV40 late polyadenylation signal, optionally wherein the BGH polyadenylation signal comprises the sequence set forth in SEQ ID NO: 858 and the unidirectional SV40 late polyadenylation signal comprises the sequence set forth in SEQ ID NO: 859, optionally wherein the polyadenylation signal comprising the BGH polyadenylation signal and the unidirectional SV40 late polyadenylation signal comprises the sequence set forth in SEQ ID NO: 902, wherein the nucleic acid construct does not comprise a promoter that drives the expression of the multidomain therapeutic protein, and wherein the nucleic acid construct does not comprise a homology arm.

[0035] In some such methods, the polypeptide of interest is a factor VIII protein. In some such methods, the polypeptide of interest is an antigen-binding protein, optionally wherein the antigen-binding protein is an antibody. In some such methods, the target genomic locus is an albumin gene, optionally wherein the albumin gene is a human albumin gene. In some such methods, the nuclease target site is in intron 1 of the albumin gene.

[0036] In some such methods, the nuclease agent comprises: (a) a zinc finger nuclease (ZFN); (b) a transcription activator-like effector nuclease (TALEN); or (c) (i) a Cas protein or a nucleic acid encoding the Cas protein; and (ii) a guide RNA or one or more DNAs encoding the guide RNA, wherein the guide RNA comprises a DNA-targeting segment that targets a guide RNA target sequence, and wherein the guide RNA binds to the Cas protein and targets the Cas protein to the guide RNA target sequence.

[0037] In some such methods, the nuclease agent comprises: (a) a Cas protein or a nucleic acid encoding the Cas protein; and (b) a guide RNA or one or more DNAs encoding the guide RNA, wherein the guide RNA comprises a DNA-targeting segment that targets a guide RNA target sequence, and wherein the guide RNA binds to the Cas protein and targets the Cas protein to the guide RNA target sequence.

[0038] In some such methods, the DNA-targeting segment comprises any one of SEQ ID NOS: 153-184. Optionally, the DNA-targeting segment comprises any one of SEQ ID NOS: 159, 153, 156, and 164. In some such methods, the DNA-targeting segment consists of any one of SEQ ID NOS: 153-184. Optionally, the DNA-targeting segment consists of any one of SEQ ID NOS: 159, 153, 156, and 164. In some such methods, the guide RNA comprises any one of SEQ ID NOS: 185-248, optionally wherein the guide RNA comprises any one of SEQ ID NOS: 191, 223, 185, 217, 188, 220, 196, and 228. In some such methods, the DNA-targeting segment comprises or consists of SEQ ID NO: 159. In some such methods, the guide RNA comprises SEQ ID NO: 191 or 223. Some such methods comprise administering the guide RNA in the form of RNA.

[0039] In some such methods, the guide RNA comprises at least one modification. In some such methods, the at least one modification comprises: (i) phosphorothioate bonds between the first four nucleotides at the 5′ end of the guide RNA; (ii) phosphorothioate bonds between the last four nucleotides at the 3′ end of the guide RNA; (iii) 2′-O-methyl-modified nucleotides at the first three nucleotides at the 5′ end of the guide RNA; and (iv) 2′-O-methyl-modified nucleotides at the last three nucleotides at the 3′ end of the guide RNA. Some such methods comprise administering the guide RNA in the form of RNA, the guide RNA comprises SEQ ID NO: 223, and the guide RNA comprises: (i) phosphorothioate bonds between the first four nucleotides at the 5′ end of the guide RNA; (ii) phosphorothioate bonds between the last four nucleotides at the 3′ end of the guide RNA; (iii) 2′-O-methyl-modified nucleotides at the first three nucleotides at the 5′ end of the guide RNA; and (iv) 2′-O-methyl-modified nucleotides at the last three nucleotides at the 3′ end of the guide RNA.

[0040] In some such methods, the Cas protein is a Cas9 protein. Optionally, the Cas protein is derived from a Streptococcus pyogenes Cas9 protein. In some such methods, the Cas protein comprises the sequence set forth in SEQ ID NO: 134. Some such methods comprise administering the nucleic acid encoding the Cas protein, wherein the nucleic acid comprises an mRNA encoding the Cas protein. In some such methods, the mRNA encoding the Cas protein comprises at least one modification. In some such methods, the mRNA encoding the Cas protein is fully substituted with N1-methyl-pseudouridine. In some such methods, the mRNA encoding the Cas protein comprises the sequence set forth in SEQ ID NO: 124 or 125. Some such methods comprise administering the nucleic acid encoding the Cas protein, wherein the nucleic acid comprises an mRNA encoding the Cas protein, the mRNA encoding the Cas protein comprises the sequence set forth in SEQ ID NO: 124 or 125, and the mRNA encoding the Cas protein is fully substituted with N1-methyl-pseudouridine, comprises a 5′ cap, and comprises a poly(A) tail.

[0041] Some such methods comprise administering the guide RNA in the form of RNA, and the guide RNA comprises SEQ ID NO: 191 or 223, and the method comprises administering the nucleic acid encoding the Cas protein, wherein the nucleic acid comprises an mRNA encoding the Cas protein, and the mRNA encoding the Cas protein comprises the sequence set forth in SEQ ID NO: 124 or 125. Some such methods comprise administering the guide RNA in the form of RNA, the guide RNA comprises SEQ ID NO: 223, and the guide RNA comprises: (i) phosphorothioate bonds between the first four nucleotides at the 5′ end of the guide RNA; (ii) phosphorothioate bonds between the last four nucleotides at the 3′ end of the guide RNA; (iii) 2′-O-methyl-modified nucleotides at the first three nucleotides at the 5′ end of the guide RNA; and (iv) 2′-O-methyl-modified nucleotides at the last three nucleotides at the 3′ end of the guide RNA, and the method comprises administering the nucleic acid encoding the Cas protein, wherein the nucleic acid comprises an mRNA encoding the Cas protein, the mRNA encoding the Cas protein comprises the sequence set forth in SEQ ID NO: 124 or 125, and the mRNA encoding the Cas protein is fully substituted with N1-methyl-pseudouridine, comprises a 5′ cap, and comprises a poly(A) tail.

[0042] In some such methods, the Cas protein or the nucleic acid encoding the Cas protein and the guide RNA or the one or more DNAs encoding the guide RNA are associated with a lipid nanoparticle. In some such methods, the lipid nanoparticle comprises a cationic lipid, a neutral lipid, a helper lipid, and a stealth lipid. In some such methods, the cationic lipid is Lipid A ((9Z,12Z)-3-((4,4-bis(octyloxy)butanoyl)oxy)-2-((((3-(diethylamino)propoxy)carbonyl)oxy)methyl)propyl octadeca-9,12-dienoate), and/or the neutral lipid is distearoylphosphatidylcholine or 1,2-distearoyl-sn-glycero-3-phosphocholine (DSPC), and/or the helper lipid is cholesterol, and/or the stealth lipid is 1,2-dimyristoyl-rac-glycero-3-methoxypolyethylene glycol-2000. In some such methods, the cationic lipid is Lipid A, the neutral lipid is DSPC, the helper lipid is cholesterol, and the stealth lipid is PEG2k-DMG. In some such methods, the lipid nanoparticle comprises four lipids at the following molar ratios: about 50 mol % Lipid A, about 9 mol % DSPC, about 38 mol % cholesterol, and about 3 mol % PEG2k-DMG.

[0043] In some such methods, the cell is a liver cell or a hepatocyte, or the population of cells is a population of liver cells or hepatocytes. In some such methods, the subject is a human subject. In some such methods, the subject is a neonatal subject. In some such methods, the subject has preexisting AAV immunity. In some such methods, the nucleic acid vector is in an adeno-associated viral (AAV) vector, and the subject has preexisting AAV immunity. In some such methods, the method further comprises determining whether the subject has immunity against the nucleic acid construct, the polypeptide of interest, the nuclease agent, the one or more nucleic acids encoding the nuclease agent, or the delivery vehicle for the nucleic acid construct, the nuclease agent, or the one or more nucleic acids encoding the nuclease agent prior to the administering. Optionally, the determining comprises determining the presence of neutralizing antibodies against the nucleic acid construct, the polypeptide of interest, the nuclease agent, the one or more nucleic acids encoding the nuclease agent, or the delivery vehicle for the nucleic acid construct, the nuclease agent, or the one or more nucleic acids encoding the nuclease agent.

[0044] In another aspect, provided are compositions or combinations comprising an effective amount of a plasma cell depleting agent in combination with: (a) a nucleic acid construct comprising a coding sequence for the polypeptide of interest; and (b) a nuclease agent or one or more nucleic acids encoding the nuclease agent, wherein the nuclease agent targets a nuclease target site in a target genomic locus.

[0045] In some such compositions or combinations, the plasma cell depleting agent is capable of depleting long-lived plasma cells (LLPC). In some such compositions or combinations, the plasma cell depleting agent is a B cell maturation antigen (BCMA) targeting agent. In some such compositions or combinations, the BCMA targeting agent is a chimeric antigen receptor against BCMA or an anti-BCMA antibody or a functional fragment thereof. In some such compositions or combinations, the anti-BCMA antibody or functional fragment thereof is conjugated to a cytotoxic agent. In some such compositions or combinations, the anti-BCMA antibody is a multispecific antibody or a functional fragment thereof. In some such compositions or combinations, the multispecific anti-BCMA antibody or functional fragment thereof targets BCMA and CD3. In some such compositions or combinations, the multispecific anti-BCMA antibody or functional fragment thereof is anti-BCMA×CD3 bispecific antibody or functional fragment thereof. In some such compositions or combinations, the anti-BCMA×CD3 bispecific antibody is selected from linvoseltamab (REGN5458), REGN5459, pacanalotamab (AMG420), teclistamab (JNJ-64007957), AMG701, alnuctamab (CC-93269), EM801, EM901, elranatamab (PF-06863135), TNB383B (ABBV-383), and TNB384B.

[0046] In some such compositions or combinations, the anti-BCMA×CD3 bispecific antibody or functional fragment thereof comprises a first antigen-binding domain that specifically binds to BCMA comprising three heavy chain CDRs (HCDR1, HCDR2 and HCDR3) contained within a heavy chain variable region (HCVR) comprising the amino acid sequence of SEQ ID NO: 2, and three light chain CDRs (LCDR1, LCDR2 and LCDR3) contained within a light chain variable region (LCVR) comprising the amino acid sequence of SEQ ID NO: 18. In some such compositions or combinations, the first antigen-binding domain that specifically binds to BCMA comprises a HCDR1 comprising the amino acid sequence of SEQ ID NO: 4, a HCDR2 comprising the amino acid sequence of SEQ ID NO: 6, a HCDR3 comprising the amino acid sequence of SEQ ID NO: 8, a LCDR1 comprising the amino acid sequence of SEQ ID NO: 20, a LCDR2 comprising the amino acid sequence of SEQ ID NO: 22, and a LCDR3 comprising the amino acid sequence of SEQ ID NO: 24.

[0047] In some such compositions or combinations, the anti-BCMA×CD3 bispecific antibody or functional fragment thereof comprises a second antigen-binding domain that specifically binds to CD3 comprising three heavy chain CDRs (HCDR1, HCDR2 and HCDR3) contained within a heavy chain variable region (HCVR) comprising the amino acid sequence selected from the group consisting of SEQ ID NOS: 26 and 34, and three light chain CDRs (LCDR1, LCDR2 and LCDR3) contained within a light chain variable region (LCVR) comprising the amino acid sequence of SEQ ID NO: 18. In some such compositions or combinations, the second antigen-binding domain that specifically binds to CD3 comprises a HCDR1 comprising the amino acid sequence of SEQ ID NO: 28 or 36, a HCDR2 comprising the amino acid sequence of SEQ ID NO: 30 or 38, a HCDR3 comprising the amino acid sequence of SEQ ID NO: 32 or 40, a LCDR1 comprising the amino acid sequence of SEQ ID NO: 20, a LCDR2 comprising the amino acid sequence of SEQ ID NO: 22, and a LCDR3 comprising the amino acid sequence of SEQ ID NO: 24.

[0048] In some such compositions or combinations, the anti-BCMA×CD3 bispecific antibody or functional fragment thereof comprises: (a) a first antigen-binding domain that comprises HCDR1, HCDR2, and HCDR3 comprising the amino acid sequences of SEQ ID NOS: 4, 6, and 8, respectively, and LCDR1, LCDR2, and LCDR3 comprising the amino acid sequences of SEQ ID NOS: 20, 22, and 24, respectively; and (b) a second antigen-binding domain that comprises HCDR1, HCDR2, and HCDR3 comprising the amino acid sequences of SEQ ID NOS: 28, 30, and 32, respectively, and LCDR1, LCDR2, and LCDR3 comprising the amino acid sequences of SEQ ID NOS: 20, 22, and 24, respectively. In some such compositions or combinations, the anti-BCMA×CD3 bispecific antibody or functional fragment thereof comprises: (a) a first antigen-binding domain that comprises HCDR1, HCDR2, and HCDR3 comprising the amino acid sequences of SEQ ID NOS: 4, 6, and 8, respectively, and LCDR1, LCDR2, and LCDR3 comprising the amino acid sequences of SEQ ID NOS: 20, 22, and 24, respectively; and (b) a second antigen-binding domain that comprises HCDR1, HCDR2, and HCDR3 comprising the amino acid sequences of SEQ ID NOS: 36, 38, and 40, respectively, and LCDR1, LCDR2, and LCDR3 comprising the amino acid sequences of SEQ ID NOS: 20, 22, and 24, respectively. In some such compositions or combinations, the anti-BCMA×CD3 bispecific antibody or functional fragment thereof comprises a human IgG heavy chain constant region, optionally wherein the human IgG heavy chain constant region comprises one or more modifications that increase binding to a neonatal Fc receptor (FcRn) and/or the human IgG heavy chain constant region comprises one or more modifications that decrease binding to an Fc-gamma receptor (FcγR). In some such compositions or combinations, the human IgG heavy chain constant region is isotype IgG4 or IgG1.

[0049] In some such compositions or combinations, the plasma cell depleting agent is further in combination with an effective amount of a B cell depleting agent and/or an immunoglobulin depleting agent. In some such compositions or combinations, the plasma cell depleting agent is further in combination with an effective amount of a B cell depleting agent and an immunoglobulin depleting agent. In some such compositions or combinations, the B cell depleting agent is capable of depleting B cells and plasma cells that express low levels of BCMA. In some such compositions or combinations, the B cell depleting agent is an agent that binds to a B cell surface molecule. In some such compositions or combinations, the B cell depleting agent is selected from an anti-CD19 antibody, an anti-CD20 antibody, an anti-CD22 antibody, an anti-CD79 antibody, an anti-CD20×CD3 bispecific antibody, an anti-CD19×CD3 bispecific antibody, an anti-CD22×CD3 bispecific antibody, an anti-CD79×CD3 bispecific antibody, functional fragments of any of said antibodies, and any combinations thereof. In some such compositions or combinations, the B cell depleting agent is selected from an anti-CD19 antibody, an anti-CD20 antibody, an anti-CD19 antibody and an anti-CD20 antibody, an anti-CD22 antibody, an anti-CD79 antibody, an anti-CD20×CD3 bispecific antibody, an anti-CD19×CD3 bispecific antibody, an anti-CD22×CD3 bispecific antibody, an anti-CD79×CD3 bispecific antibody, functional fragments of any of said antibodies, and any combinations thereof. In some such compositions or combinations, the B cell depleting agent comprises an anti-CD20 antibody or a functional fragment thereof and an anti-CD19 antibody or a functional fragment thereof. In some such compositions or combinations, the B cell depleting agent is an anti-CD20 antibody or a functional fragment thereof, wherein the anti-CD20 antibody is a multispecific antibody or a functional fragment thereof. In some such compositions or combinations, the multispecific anti-CD20 antibody or functional fragment thereof targets CD20 and CD3. In some such compositions or combinations, the multispecific anti-CD20 antibody or functional fragment thereof is anti-CD20×CD3 bispecific antibody or functional fragment thereof.

[0050] In some such compositions or combinations, the anti-CD20×CD3 bispecific antibody or functional fragment thereof comprises a first antigen-binding domain that specifically binds to CD20 comprising three heavy chain CDRs (HCDR1, HCDR2 and HCDR3) contained within a heavy chain variable region (HCVR) comprising the amino acid sequence of SEQ ID NO: 44, and three light chain CDRs (LCDR1, LCDR2 and LCDR3) contained within a light chain variable region (LCVR) comprising the amino acid sequence of SEQ ID NO: 45. In some such compositions or combinations, the first antigen-binding domain that specifically binds to CD20 comprises a HCDR1 comprising the amino acid sequence of SEQ ID NO: 47, a HCDR2 comprising the amino acid sequence of SEQ ID NO: 48, a HCDR3 comprising the amino acid sequence of SEQ ID NO: 49, a LCDR1 comprising the amino acid sequence of SEQ ID NO: 50, a LCDR2 comprising the amino acid sequence of SEQ ID NO: 51, and a LCDR3 comprising the amino acid sequence of SEQ ID NO: 52.

[0051] In some such compositions or combinations, the anti-CD20×CD3 bispecific antibody or functional fragment thereof comprises a second antigen-binding domain that specifically binds to CD3 comprising three heavy chain CDRs (HCDR1, HCDR2 and HCDR3) contained within a heavy chain variable region (HCVR) comprising the amino acid sequence of SEQ ID NO: 46, and three light chain CDRs (LCDR1, LCDR2 and LCDR3) contained within a light chain variable region (LCVR) comprising the amino acid sequence of SEQ ID NO: 45. In some such compositions or combinations, the second antigen-binding domain that specifically binds to CD3 comprises a HCDR1 comprising the amino acid sequence of SEQ ID NO: 53, a HCDR2 comprising the amino acid sequence of SEQ ID NO: 54, a HCDR3 comprising the amino acid sequence of SEQ ID NO: 55, a LCDR1 comprising the amino acid sequence of SEQ ID NO: 50, a LCDR2 comprising the amino acid sequence of SEQ ID NO: 51, and a LCDR3 comprising the amino acid sequence of SEQ ID NO: 52.

[0052] In some such compositions or combinations, the anti-CD20×CD3 bispecific antibody or functional fragment thereof comprises: (a) a first antigen-binding domain that comprises HCDR1, HCDR2, and HCDR3 comprising the amino acid sequences of SEQ ID NOS: 47, 48, and 49, respectively, and LCDR1, LCDR2, and LCDR3 comprising the amino acid sequences of SEQ ID NOS: 50, 51, and 52, respectively; and (b) a second antigen-binding domain that comprises HCDR1, HCDR2, and HCDR3 comprising the amino acid sequences of SEQ ID NOS: 53, 54, and 55, respectively, and LCDR1, LCDR2, and LCDR3 comprising the amino acid sequences of SEQ ID NOS: 50, 51, and 52, respectively. In some such compositions or combinations, the anti-CD20×CD3 bispecific antibody or functional fragment thereof comprises a human IgG heavy chain constant region, optionally wherein the human IgG heavy chain constant region comprises one or more modifications that increase binding to a neonatal Fc receptor (FcRn) and/or the human IgG heavy chain constant region comprises one or more modifications that decrease binding to an Fc-gamma receptor (FcγR). In some such compositions or combinations, the human IgG heavy chain constant region is isotype IgG4 or IgG1.

[0053] In some such compositions or combinations, the B cell depleting agent is an agent targeting a B cell survival factor. In some such compositions or combinations, the B cell depleting agent is a BLyS/BAFF inhibitor, an APRIL inhibitor, a BLyS receptor 3/BAFF receptor inhibitor, or any combination thereof. In some such compositions or combinations, the immunoglobulin depleting agent is capable of accelerating IgG clearance. In some such compositions or combinations, the immunoglobulin depleting agent is a neonatal Fc receptor (FcRn) blocker. In some such compositions or combinations, the FcRn blocker is selected from Efgartigimod (ARGX-113), Rozanolixizumab (UCB7665), Batoclimab (RVT-1401), IMVT-1402, Nipocalimab (M281), Orilanolimab (SYNT001), and any combinations thereof.

[0054] In some such compositions or combinations, the nucleic acid construct is in the nucleic acid vector. Optionally, the nucleic acid vector is a viral vector. In some such compositions or combinations, the nucleic acid vector is an adeno-associated viral (AAV) vector. Optionally, the nucleic acid construct is flanked by inverted terminal repeats (ITRs) on each end. Optionally, the ITR on at least one end comprises, consists essentially of, or consists of SEQ ID NO: 283. Optionally, the ITR on each end comprises, consists essentially of, or consists of SEQ ID NO: 283. Optionally, the ITR on at least one end comprises, consists essentially of, or consists of SEQ ID NO: 281. Optionally, the ITR on each end comprises, consists essentially of, or consists of SEQ ID NO: 281. In some such compositions or combinations, the AAV vector is a single-stranded AAV (ssAAV) vector. In some such compositions or combinations, the AAV vector is a recombinant AAV8 (rAAV8) vector.

[0055] In some such compositions or combinations, the polypeptide of interest is a factor IX protein. In some such compositions or combinations, the factor IX protein coding sequence encodes a factor IX protein comprising SEQ ID NO: 97. In some such compositions or combinations, the factor IX protein coding sequence comprises or consists of SEQ ID NO: 68, or the factor IX protein coding sequence comprises or consists of SEQ ID NO: 61.

[0056] In some such compositions or combinations, the nucleic acid construct is a bidirectional construct, wherein the factor IX protein coding sequence is a first factor IX protein coding sequence, and the bidirectional construct further comprises a reverse complement of a second factor IX protein coding sequence, wherein the first factor IX protein coding sequence and the second factor IX protein coding sequence are different but encode the same factor IX protein sequence. In some such compositions or combinations, the nucleic acid construct comprises from 5′ to 3′: a first splice acceptor, the first factor IX protein coding sequence, a first polyadenylation signal, a reverse complement of a second polyadenylation signal, the reverse complement of the second factor IX protein coding sequence, and a reverse complement of a second splice acceptor, wherein: (i) the first factor IX protein coding sequence comprises SEQ ID NO: 61 and the second factor IX protein coding sequence comprises SEQ ID NO: 68; or (ii) the first factor IX protein coding sequence comprises SEQ ID NO: 68 and the second factor IX protein coding sequence comprises SEQ ID NO: 61, wherein the nucleic acid construct does not comprise a promoter that drives the expression of the factor IX protein, and wherein the nucleic acid construct does not comprise homology arms. In some such compositions or combinations, the nucleic acid construct comprises SEQ ID NO: 109 or 82 or the reverse complement thereof.

[0057] In some such compositions or combinations, the nucleic acid construct is a unidirectional construct. In some such compositions or combinations, the nucleic acid construct is a unidirectional construct comprising the factor IX protein coding sequence, wherein the nucleic acid construct comprises from 5′ to 3′: a splice acceptor, the factor IX protein coding sequence, and a polyadenylation signal, wherein the factor IX protein coding sequence comprises SEQ ID NO: 61 or SEQ ID NO: 68, wherein the nucleic acid construct does not comprise a promoter that drives the expression of the factor IX protein, and wherein the nucleic acid construct does not comprise homology arms.

[0058] In some such compositions or combinations, the polypeptide of interest is a multidomain therapeutic protein comprising a delivery domain fused to a lysosomal alpha-glucosidase. In some such compositions or combinations, the lysosomal alpha-glucosidase comprises or consists of the sequence set forth in SEQ ID NO: 296. In some such compositions or combinations, the lysosomal alpha-glucosidase coding sequence comprises or consist of the sequence set forth in SEQ ID NO: 857. In some such compositions or combinations, the delivery domain is a CD63-binding delivery domain. In some such compositions or combinations, the CD63-binding delivery domain comprises an anti-CD63 antigen-binding protein. In some such compositions or combinations, the CD63-binding delivery domain is a single-chain variable fragment (scFv). In some such compositions or combinations, the scFv comprises or consists of the sequence set forth in SEQ ID NO: 306. In some such compositions or combinations, the scFv coding sequence comprises or consists of the sequence set forth in SEQ ID NO: 866. In some such compositions or combinations, the multidomain therapeutic protein comprises or consists of the sequence set forth in SEQ ID NO: 316. In some such compositions or combinations, the coding sequence for the multidomain therapeutic protein comprises or consists of the sequence set forth in SEQ ID NO: 863. Optionally, the nucleic acid construct comprises the sequence set forth in SEQ ID NO: 900 or 884.

[0059] In some such compositions or combinations, the nucleic acid construct comprises from 5′ to 3′: a splice acceptor, the coding sequence for the multidomain therapeutic protein, and a polyadenylation signal or sequence, wherein the coding sequence for the multidomain therapeutic protein comprises the sequence set forth in SEQ ID NO: 863, optionally wherein the nucleic acid construct comprises the sequence set forth in SEQ ID NO: 900 or 884, wherein the polyadenylation signal comprises a BGH polyadenylation signal and a unidirectional SV40 late polyadenylation signal, optionally wherein the BGH polyadenylation signal comprises the sequence set forth in SEQ ID NO: 858 and the unidirectional SV40 late polyadenylation signal comprises the sequence set forth in SEQ ID NO: 859, optionally wherein the polyadenylation signal comprising the BGH polyadenylation signal and the unidirectional SV40 late polyadenylation signal comprises the sequence set forth in SEQ ID NO: 902, wherein the nucleic acid construct does not comprise a promoter that drives the expression of the multidomain therapeutic protein, and wherein the nucleic acid construct does not comprise a homology arm.

[0060] In some such compositions or combinations, the delivery domain is a TfR-binding delivery domain. In some such compositions or combinations, the TfR-binding delivery domain comprises an anti-TfR antigen-binding protein. In some such compositions or combinations, the anti-TfR antigen-binding protein comprises a HCVR comprising the HCDR1, HCDR2 and HCDR3 of a HCVR that comprises the amino acid sequence set forth in SEQ ID NO: 555 (or a variant thereof); and a LCVR comprising the LCDR1, LCDR2 and LCDR3 of a LCVR that comprises the amino acid sequence set forth in SEQ ID NO: 560 (or a variant thereof). In some such compositions or combinations, the anti-TfR antigen-binding protein comprises a HCVR that comprises: an HCDR1 comprising the amino acid sequence set forth in SEQ ID NO: 556 (or a variant thereof), an HCDR2 comprising the amino acid sequence set forth in SEQ ID NO: 557 (or a variant thereof), and an HCDR3 comprising the amino acid sequence set forth in SEQ ID NO: 558 (or a variant thereof); and a LCVR that comprises: an LCDR1 comprising the amino acid sequence set forth in SEQ ID NO: 561 (or a variant thereof), an LCDR2 comprising the amino acid sequence set forth in SEQ ID NO: 562 (or a variant thereof), and an LCDR3 comprising the amino acid sequence set forth in SEQ ID NO: 563 (or a variant thereof). In some such compositions or combinations, the anti-TfR antigen-binding protein comprises a HCVR that comprises the amino acid sequence set forth in SEQ ID NO: 555 (or a variant thereof); and a LCVR that comprises the amino acid sequence set forth in SEQ ID NO: 560 (or a variant thereof).

[0061] In some such compositions or combinations, the TfR-binding delivery domain comprises a single-chain variable fragment (scFv). In some such compositions or combinations, the scFv comprises or consists of the sequence set forth in SEQ ID NO: 672. In some such compositions or combinations, the scFv coding sequence comprises or consists of the sequence set forth in SEQ ID NO: 713. In some such compositions or combinations, the multidomain therapeutic protein comprises or consists of the sequence set forth in SEQ ID NO: 691. In some such compositions or combinations, the coding sequence for the multidomain therapeutic protein comprises or consists of the sequence set forth in SEQ ID NO: 852. Optionally, the nucleic acid construct comprises the sequence set forth in SEQ ID NO: 887 or 871.

[0062] In some such compositions or combinations, the nucleic acid construct comprises from 5′ to 3′: a splice acceptor, the coding sequence for the multidomain therapeutic protein, and a polyadenylation signal or sequence, wherein the coding sequence for the multidomain therapeutic protein comprises the sequence set forth in SEQ ID NO: 852, optionally wherein the nucleic acid construct comprises the sequence set forth in SEQ ID NO: 887 or 871, wherein the polyadenylation signal comprises a BGH polyadenylation signal and a unidirectional SV40 late polyadenylation signal, optionally wherein the BGH polyadenylation signal comprises the sequence set forth in SEQ ID NO: 858 and the unidirectional SV40 late polyadenylation signal comprises the sequence set forth in SEQ ID NO: 859, optionally wherein the polyadenylation signal comprising the BGH polyadenylation signal and the unidirectional SV40 late polyadenylation signal comprises the sequence set forth in SEQ ID NO: 902, wherein the nucleic acid construct does not comprise a promoter that drives the expression of the multidomain therapeutic protein, and wherein the nucleic acid construct does not comprise a homology arm.

[0063] In some such compositions or combinations, the polypeptide of interest is a factor VIII protein. In some such compositions or combinations, the polypeptide of interest is an antigen-binding protein, optionally wherein the antigen-binding protein is an antibody. In some such compositions or combinations, the target genomic locus is an albumin gene, optionally wherein the albumin gene is a human albumin gene. In some such compositions or combinations, the nuclease target site is in intron 1 of the albumin gene.

[0064] In some such compositions or combinations, the nuclease agent comprises: (a) a zinc finger nuclease (ZFN); (b) a transcription activator-like effector nuclease (TALEN); or (c) (i) a Cas protein or a nucleic acid encoding the Cas protein; and (ii) a guide RNA or one or more DNAs encoding the guide RNA, wherein the guide RNA comprises a DNA-targeting segment that targets a guide RNA target sequence, and wherein the guide RNA binds to the Cas protein and targets the Cas protein to the guide RNA target sequence.

[0065] In some such compositions or combinations, the nuclease agent comprises: (a) a Cas protein or a nucleic acid encoding the Cas protein; and (b) a guide RNA or one or more DNAs encoding the guide RNA, wherein the guide RNA comprises a DNA-targeting segment that targets a guide RNA target sequence, and wherein the guide RNA binds to the Cas protein and targets the Cas protein to the guide RNA target sequence.

[0066] In some such compositions or combinations, the DNA-targeting segment comprises any one of SEQ ID NOS: 153-184. Optionally, the DNA-targeting segment comprises any one of SEQ ID NOS: 159, 153, 156, and 164. In some such compositions or combinations, the DNA-targeting segment consists of any one of SEQ ID NOS: 153-184. Optionally, the DNA-targeting segment consists of any one of SEQ ID NOS: 159, 153, 156, and 164. In some such compositions or combinations, the guide RNA comprises any one of SEQ ID NOS: 185-248. Optionally, the guide RNA comprises any one of SEQ ID NOS: 191, 223, 185, 217, 188, 220, 196, and 228. In some such compositions or combinations, the DNA-targeting segment comprises or consists of SEQ ID NO: 159. In some such compositions or combinations, the guide RNA comprises SEQ ID NO: 191 or 223. In some such compositions or combinations, the composition or combination comprises the guide RNA in the form of RNA.

[0067] In some such compositions or combinations, the guide RNA comprises at least one modification. In some such compositions or combinations, the at least one modification comprises: (i) phosphorothioate bonds between the first four nucleotides at the 5′ end of the guide RNA; (ii) phosphorothioate bonds between the last four nucleotides at the 3′ end of the guide RNA; (iii) 2′-O-methyl-modified nucleotides at the first three nucleotides at the 5′ end of the guide RNA; and (iv) 2′-O-methyl-modified nucleotides at the last three nucleotides at the 3′ end of the guide RNA. In some such compositions or combinations, the composition or combination comprises the guide RNA in the form of RNA, the guide RNA comprises SEQ ID NO: 223, and the guide RNA comprises: (i) phosphorothioate bonds between the first four nucleotides at the 5′ end of the guide RNA; (ii) phosphorothioate bonds between the last four nucleotides at the 3′ end of the guide RNA; (iii) 2′-O-methyl-modified nucleotides at the first three nucleotides at the 5′ end of the guide RNA; and (iv) 2′-O-methyl-modified nucleotides at the last three nucleotides at the 3′ end of the guide RNA.

[0068] In some such compositions or combinations, the Cas protein is a Cas9 protein. Optionally, the Cas protein is derived from a Streptococcus pyogenes Cas9 protein. In some such compositions or combinations, the Cas protein comprises the sequence set forth in SEQ ID NO: 134. In some such compositions or combinations, the composition or combination comprises the nucleic acid encoding the Cas protein, wherein the nucleic acid comprises an mRNA encoding the Cas protein. In some such compositions or combinations, the mRNA encoding the Cas protein comprises at least one modification. In some such compositions or combinations, the mRNA encoding the Cas protein is fully substituted with N1-methyl-pseudouridine. In some such compositions or combinations, the mRNA encoding the Cas protein comprises the sequence set forth in SEQ ID NO: 124 or 125.

[0069] In some such compositions or combinations, the composition or combination comprises the nucleic acid encoding the Cas protein, wherein the nucleic acid comprises an mRNA encoding the Cas protein, the mRNA encoding the Cas protein comprises the sequence set forth in SEQ ID NO: 124 or 125, and the mRNA encoding the Cas protein is fully substituted with N1-methyl-pseudouridine, comprises a 5′ cap, and comprises a poly(A) tail. In some such compositions or combinations, the composition or combination comprises the guide RNA in the form of RNA, and the guide RNA comprises SEQ ID NO: 191 or 223, and the composition or combination comprises administering the nucleic acid encoding the Cas protein, wherein the nucleic acid comprises an mRNA encoding the Cas protein, and the mRNA encoding the Cas protein comprises the sequence set forth in SEQ ID NO: 124 or 125.

[0070] In some such compositions or combinations, the composition or combination comprises the guide RNA in the form of RNA, the guide RNA comprises SEQ ID NO: 223, and the guide RNA comprises: (i) phosphorothioate bonds between the first four nucleotides at the 5′ end of the guide RNA; (ii) phosphorothioate bonds between the last four nucleotides at the 3′ end of the guide RNA; (iii) 2′-O-methyl-modified nucleotides at the first three nucleotides at the 5′ end of the guide RNA; and (iv) 2′-O-methyl-modified nucleotides at the last three nucleotides at the 3′ end of the guide RNA, wherein the composition or combination comprises the nucleic acid encoding the Cas protein, and wherein the nucleic acid comprises an mRNA encoding the Cas protein, the mRNA encoding the Cas protein comprises the sequence set forth in SEQ ID NO: 124 or 125, and the mRNA encoding the Cas protein is fully substituted with N1-methyl-pseudouridine, comprises a 5′ cap, and comprises a poly(A) tail.

[0071] In some such compositions or combinations, the Cas protein or the nucleic acid encoding the Cas protein and the guide RNA or the one or more DNAs encoding the guide RNA are associated with a lipid nanoparticle. In some such compositions or combinations, the lipid nanoparticle comprises a cationic lipid, a neutral lipid, a helper lipid, and a stealth lipid. In some such compositions or combinations, the cationic lipid is Lipid A ((9Z,12Z)-3-((4,4-bis(octyloxy)butanoyl)oxy)-2-((((3-(diethylamino)propoxy)carbonyl)oxy)methyl)propyl octadeca-9,12-dienoate), and/or the neutral lipid is distearoylphosphatidylcholine or 1,2-distearoyl-sn-glycero-3-phosphocholine (DSPC), and/or the helper lipid is cholesterol, and/or the stealth lipid is 1,2-dimyristoyl-rac-glycero-3-methoxypolyethylene glycol-2000. In some such compositions or combinations, the cationic lipid is Lipid A, the neutral lipid is DSPC, the helper lipid is cholesterol, and the stealth lipid is PEG2k-DMG. In some such compositions or combinations, the lipid nanoparticle comprises four lipids at the following molar ratios: about 50 mol % Lipid A, about 9 mol % DSPC, about 38 mol % cholesterol, and about 3 mol % PEG2k-DMG.

[0072] Some such compositions or combinations are provided for use in a method of inserting a nucleic acid encoding a polypeptide of interest into a target genomic locus in a cell or a population of cells in a subject.

[0073] Some such compositions or combinations are provided for use in a method of expressing a polypeptide of interest from a target genomic locus in a cell or a population of cells in a subject.

[0074] Some such compositions or combinations are provided for use in a method of treating an enzyme deficiency in a subject in need thereof.

[0075] Some such compositions or combinations are provided for use in a method of preventing or reducing the onset of a sign or symptom of an enzyme deficiency in a subject in need thereof.

[0076] In another aspect, provided are kits comprising any such compositions or combinations described herein.

[0077] In another aspect, provided are plasma cell depleting agents for use in any such methods described herein.

[0078] In another aspect, provided are methods of inserting a nucleic acid encoding a polypeptide of interest into a target genomic locus in a cell or a population of cells in a subject, comprising administering to the subject: (a) a nucleic acid construct comprising a coding sequence for the polypeptide of interest; (b) a nuclease agent or one or more nucleic acids encoding the nuclease agent, wherein the nuclease agent targets a nuclease target site in the target genomic locus; and (c) an effective amount of an anti-CD20×CD3 bispecific antibody or functional fragment thereof, wherein the nuclease agent cleaves the nuclease target site, and the nucleic acid construct is inserted into the target genomic locus. In some such methods, provided are methods of inserting a nucleic acid encoding a polypeptide of interest into a target genomic locus in a cell or a population of cells in a subject, comprising administering to the subject: (a) a nucleic acid construct comprising a coding sequence for the polypeptide of interest; (b) a nuclease agent or one or more nucleic acids encoding the nuclease agent, wherein the nuclease agent targets a nuclease target site in the target genomic locus; and (c) an effective amount of an anti-CD20×CD3 bispecific antibody or functional fragment thereof, wherein the subject does not have preexisting immunity to the nucleic acid construct, the polypeptide of interest, the nuclease agent, the one or more nucleic acids encoding the nuclease agent, or a delivery vehicle for the nucleic acid construct, the nuclease agent, or the one or more nucleic acids encoding the nuclease agent, and wherein the nuclease agent cleaves the nuclease target site, and the nucleic acid construct is inserted into the target genomic locus.

[0079] In another aspect, provided are methods of expressing a polypeptide of interest from a target genomic locus in a cell or a population of cells in a subject, comprising administering to the subject: (a) a nucleic acid construct comprising a coding sequence for the polypeptide of interest; (b) a nuclease agent or one or more nucleic acids encoding the nuclease agent, wherein the nuclease agent targets a nuclease target site in the target genomic locus; and (c) an effective amount of an anti-CD20×CD3 bispecific antibody or functional fragment thereof, wherein the nuclease agent cleaves the nuclease target site, the nucleic acid construct is inserted into the target genomic locus to create a modified target genomic locus, and the polypeptide of interest is expressed from the modified target genomic locus. In some such methods, provided are methods of expressing a polypeptide of interest from a target genomic locus in a cell or a population of cells in a subject, comprising administering to the subject: (a) a nucleic acid construct comprising a coding sequence for the polypeptide of interest; (b) a nuclease agent or one or more nucleic acids encoding the nuclease agent, wherein the nuclease agent targets a nuclease target site in the target genomic locus; and (c) an effective amount of an anti-CD20×CD3 bispecific antibody or functional fragment thereof, wherein the subject does not have preexisting immunity to the nucleic acid construct, the polypeptide of interest, the nuclease agent, the one or more nucleic acids encoding the nuclease agent, or a delivery vehicle for the nucleic acid construct, the nuclease agent, or the one or more nucleic acids encoding the nuclease agent, and wherein the nuclease agent cleaves the nuclease target site, the nucleic acid construct is inserted into the target genomic locus to create a modified target genomic locus, and the polypeptide of interest is expressed from the modified target genomic locus.

[0080] In another aspect, provided are methods of treating an enzyme deficiency in a subject in need thereof, comprising administering to the subject: (a) a nucleic acid construct comprising a coding sequence for a polypeptide of interest, wherein the polypeptide of interest comprises an enzyme to treat the enzyme deficiency; (b) a nuclease agent or one or more nucleic acids encoding the nuclease agent, wherein the nuclease agent targets a nuclease target site in a target genomic locus; and (c) an effective amount of an anti-CD20×CD3 bispecific antibody or functional fragment thereof, wherein the nuclease agent cleaves the nuclease target site, the nucleic acid construct is inserted into the target genomic locus to create a modified target genomic locus, and the polypeptide of interest is expressed from the modified target genomic locus, thereby treating the enzyme deficiency. In some such methods, provided are methods of treating an enzyme deficiency in a subject in need thereof, comprising administering to the subject: (a) a nucleic acid construct comprising a coding sequence for a polypeptide of interest, wherein the polypeptide of interest comprises an enzyme to treat the enzyme deficiency; (b) a nuclease agent or one or more nucleic acids encoding the nuclease agent, wherein the nuclease agent targets a nuclease target site in a target genomic locus; and (c) an effective amount of an anti-CD20×CD3 bispecific antibody or functional fragment thereof, wherein the subject does not have preexisting immunity to the nucleic acid construct, the polypeptide of interest, the nuclease agent, the one or more nucleic acids encoding the nuclease agent, or a delivery vehicle for the nucleic acid construct, the nuclease agent, or the one or more nucleic acids encoding the nuclease agent, and wherein the nuclease agent cleaves the nuclease target site, the nucleic acid construct is inserted into the target genomic locus to create a modified target genomic locus, and the polypeptide of interest is expressed from the modified target genomic locus, thereby treating the enzyme deficiency.

[0081] In another aspect, provided are methods of preventing or reducing the onset of a sign or symptom of an enzyme deficiency in a subject in need thereof, comprising administering to the subject: (a) a nucleic acid construct comprising a coding sequence for a polypeptide of interest, wherein the enzyme deficiency is characterized by a loss-of-function of the polypeptide of interest; (b) a nuclease agent or one or more nucleic acids encoding the nuclease agent, wherein the nuclease agent targets a nuclease target site in a target genomic locus; and (c) an effective amount of an anti-CD20×CD3 bispecific antibody or functional fragment thereof, wherein the nuclease agent cleaves the nuclease target site, the nucleic acid construct is inserted into the target genomic locus to create a modified target genomic locus, and the polypeptide of interest is expressed from the modified target genomic locus, thereby preventing or reducing the onset of the sign or symptom of the enzyme deficiency. In some such methods, provided are methods of preventing or reducing the onset of a sign or symptom of an enzyme deficiency in a subject in need thereof, comprising administering to the subject: (a) a nucleic acid construct comprising a coding sequence for a polypeptide of interest, wherein the enzyme deficiency is characterized by a loss-of-function of the polypeptide of interest; (b) a nuclease agent or one or more nucleic acids encoding the nuclease agent, wherein the nuclease agent targets a nuclease target site in a target genomic locus; and (c) an effective amount of an anti-CD20×CD3 bispecific antibody or functional fragment thereof, wherein the subject does not have preexisting immunity to the nucleic acid construct, the polypeptide of interest, the nuclease agent, the one or more nucleic acids encoding the nuclease agent, or a delivery vehicle for the nucleic acid construct, the nuclease agent, or the one or more nucleic acids encoding the nuclease agent, and wherein the nuclease agent cleaves the nuclease target site, the nucleic acid construct is inserted into the target genomic locus to create a modified target genomic locus, and the polypeptide of interest is expressed from the modified target genomic locus, thereby preventing or reducing the onset of the sign or symptom of the enzyme deficiency.

[0082] In some such methods, the subject has a disease of a bleeding disorder characterized by the enzyme deficiency, a disease of an inborn error of metabolism characterized by the enzyme deficiency, or a lysosomal storage disease characterized by the enzyme deficiency. Optionally, the disease is hemophilia B and the polypeptide of interest is a factor IX protein, the disease is hemophilia A and the polypeptide of interest is a factor VIII protein, or the disease is Pompe disease and the polypeptide of interest is a multidomain therapeutic protein comprising a delivery domain fused to a lysosomal alpha-glucosidase.

[0083] Some such methods further comprise a subsequent administration step comprising administering to the subject at one or more subsequent times: (a) the nucleic acid construct; (b) the nuclease agent or the one or more nucleic acids encoding the nuclease agent; and optionally (c) the anti-CD20×CD3 bispecific antibody or functional fragment thereof, until a desired level of expression and/or activity of the polypeptide of interest is achieved in the subject.

[0084] Some such methods further comprise a subsequent administration step comprising administering to the subject at one or more subsequent times: (a) the nucleic acid construct; (b) a second nuclease agent or one or more nucleic acids encoding the second nuclease agent, wherein the second nuclease agent targets a second nuclease target site in the target genomic locus, wherein the second nuclease target site is different from the first nuclease target site; and optionally (c) the anti-CD20×CD3 bispecific antibody or functional fragment thereof, until a desired level of expression and/or activity of the polypeptide of interest is achieved in the subject.

[0085] Some such methods further comprise a subsequent administration step comprising administering to the subject at one or more subsequent times: (a) the nucleic acid construct; (b) a second nuclease agent or one or more nucleic acids encoding the second nuclease agent, wherein the second nuclease agent targets a second nuclease target site in a second target genomic locus that is different from the first target genomic locus; and optionally (c) the anti-CD20×CD3 bispecific antibody or functional fragment thereof, until a desired level of expression and/or activity of the polypeptide of interest is achieved in the subject.

[0086] Some such methods further comprise a subsequent administration step comprising administering to the subject at one or more subsequent times: (a) a second nucleic acid construct comprising a second coding sequence for the polypeptide of interest, wherein the second coding sequence is different from the first coding sequence; (b) (i) the first nuclease agent or the one or more nucleic acids encoding the first nuclease agent; (ii) a second nuclease agent or one or more nucleic acids encoding the second nuclease agent, wherein the second nuclease agent targets a second nuclease target site in the target genomic locus, wherein the second nuclease target site is different from the first nuclease target site; or (iii) a second nuclease agent or one or more nucleic acids encoding the second nuclease agent, wherein the second nuclease agent targets a second nuclease target site in a second target genomic locus that is different from the first target genomic locus; and optionally (c) the anti-CD20×CD3 bispecific antibody or functional fragment thereof, until a desired level of expression and/or activity of the polypeptide of interest is achieved in the subject.

[0087] Some such methods further comprise the following steps prior to the subsequent administration step: (i) measuring expression and/or activity of the polypeptide of interest in the subject; and (ii) determining the dose of the nucleic acid construct and the nuclease agent or the one or more nucleic acids encoding the nuclease agent for the subsequent administration step in order to achieve the desired level of expression and/or activity of the polypeptide of interest is achieved in the subject.

[0088] In some such methods, the polypeptide of interest is a factor IX protein, and the desired expression level of the factor IX protein in the subject is a serum level of at least about 3 μg/mL or about 3-5 μg/mL. In some such methods, the polypeptide of interest is a multidomain therapeutic protein comprising a delivery domain fused to a lysosomal alpha-glucosidase, and the desired expression level of the multidomain therapeutic protein in the subject is a serum level of at least about 2 μg/mL or at least about 5 μg/mL.

[0089] Some such methods further comprise a subsequent administration step comprising administering to the subject at one or more subsequent times: (a) a second nucleic acid construct comprising a coding sequence for a second polypeptide of interest that is different from the first polypeptide of interest; (b) (i) the first nuclease agent or the one or more nucleic acids encoding the first nuclease agent; (ii) a second nuclease agent or one or more nucleic acids encoding the second nuclease agent, wherein the second nuclease agent targets a second nuclease target site in the target genomic locus, wherein the second nuclease target site is different from the first nuclease target site; or (iii) a second nuclease agent or one or more nucleic acids encoding the second nuclease agent, wherein the second nuclease agent targets a second nuclease target site in a second target genomic locus that is different from the first target genomic locus; and optionally (c) the anti-CD20×CD3 bispecific antibody or functional fragment thereof, wherein the second nuclease agent cleaves the second nuclease target site, and the second nucleic acid construct is inserted into the second target genomic locus.

[0090] In some such methods, the one or more subsequent administration steps is one subsequent administration step. In some such methods, the one or more subsequent administration steps is two subsequent administration steps or comprises at least two subsequent administration steps.

[0091] In some such methods, the anti-CD20×CD3 bispecific antibody or functional fragment thereof is administered in the one or more subsequent administration steps if there is no preexisting anti-CD20×CD3 bispecific antibody or functional fragment thereof in the subject or if the preexisting the expression and/or activity levels of the anti-CD20×CD3 bispecific antibody or functional fragment thereof are below a desired threshold level. Optionally, the method comprises measuring the expression and/or activity levels of the anti-CD20×CD3 bispecific antibody or functional fragment thereof prior to the one or more subsequent administration steps.

[0092] In some such methods, the anti-CD20×CD3 bispecific antibody or functional fragment thereof comprises a first antigen-binding domain that specifically binds to CD20 comprising three heavy chain CDRs (HCDR1, HCDR2 and HCDR3) contained within a heavy chain variable region (HCVR) comprising the amino acid sequence of SEQ ID NO: 44, and three light chain CDRs (LCDR1, LCDR2 and LCDR3) contained within a light chain variable region (LCVR) comprising the amino acid sequence of SEQ ID NO: 45. In some such methods, the first antigen-binding domain that specifically binds to CD20 comprises a HCDR1 comprising the amino acid sequence of SEQ ID NO: 47, a HCDR2 comprising the amino acid sequence of SEQ ID NO: 48, a HCDR3 comprising the amino acid sequence of SEQ ID NO: 49, a LCDR1 comprising the amino acid sequence of SEQ ID NO: 50, a LCDR2 comprising the amino acid sequence of SEQ ID NO: 51, and a LCDR3 comprising the amino acid sequence of SEQ ID NO: 52.

[0093] In some such methods, the anti-CD20×CD3 bispecific antibody or functional fragment thereof comprises a second antigen-binding domain that specifically binds to CD3 comprising three heavy chain CDRs (HCDR1, HCDR2 and HCDR3) contained within a heavy chain variable region (HCVR) comprising the amino acid sequence of SEQ ID NO: 46, and three light chain CDRs (LCDR1, LCDR2 and LCDR3) contained within a light chain variable region (LCVR) comprising the amino acid sequence of SEQ ID NO: 45. In some such methods, the second antigen-binding domain that specifically binds to CD3 comprises a HCDR1 comprising the amino acid sequence of SEQ ID NO: 53, a HCDR2 comprising the amino acid sequence of SEQ ID NO: 54, a HCDR3 comprising the amino acid sequence of SEQ ID NO: 55, a LCDR1 comprising the amino acid sequence of SEQ ID NO: 50, a LCDR2 comprising the amino acid sequence of SEQ ID NO: 51, and a LCDR3 comprising the amino acid sequence of SEQ ID NO: 52.

[0094] In some such methods, the anti-CD20×CD3 bispecific antibody or functional fragment thereof comprises: (a) a first antigen-binding domain that comprises HCDR1, HCDR2, and HCDR3 comprising the amino acid sequences of SEQ ID NOS: 47, 48, and 49, respectively, and LCDR1, LCDR2, and LCDR3 comprising the amino acid sequences of SEQ ID NOS: 50, 51, and 52, respectively; and (b) a second antigen-binding domain that comprises HCDR1, HCDR2, and HCDR3 comprising the amino acid sequences of SEQ ID NOS: 53, 54, and 55, respectively, and LCDR1, LCDR2, and LCDR3 comprising the amino acid sequences of SEQ ID NOS: 50, 51, and 52, respectively.

[0095] In some such methods, the anti-CD20×CD3 bispecific antibody or functional fragment thereof comprises a human IgG heavy chain constant region. Optionally, the human IgG heavy chain constant region comprises one or more modifications that increase binding to a neonatal Fc receptor (FcRn) and/or the human IgG heavy chain constant region comprises one or more modifications that decrease binding to an Fc-gamma receptor (FcγR). In some such methods, the human IgG heavy chain constant region is isotype IgG4 or IgG1.

[0096] In some such methods, the anti-CD20×CD3 bispecific antibody or functional fragment thereof is administered simultaneously with the nucleic acid construct. In some such methods, the anti-CD20×CD3 bispecific antibody or functional fragment thereof is administered prior to the nucleic acid construct. In some such methods, the anti-CD20×CD3 bispecific antibody or functional fragment thereof is administered prior to and after the nucleic acid construct. In some such methods, the anti-CD20×CD3 bispecific antibody or functional fragment thereof is administered about 1 week prior to or within about 1 week prior to the nucleic acid construct. In some such methods, the nucleic acid construct is administered within about 3 months, within about 2 months, within about 7 weeks, within about 6 weeks, within about 5 weeks, within about 4 weeks, within about 3 weeks, within about 2 weeks, or within about 1 week after an initial dose of the anti-CD20×CD3 bispecific antibody or functional fragment thereof, or the nucleic acid construct is administered at least about 1 week, at least about 2 weeks, at least about 3 weeks, at least about 4 weeks, at least about 5 weeks, at least about 6 weeks, at least about 7 weeks, at least about 2 months, or at least about 3 months after an initial dose of the anti-CD20×CD3 bispecific antibody or functional fragment thereof. In some such methods, the nucleic acid construct is administered simultaneously with the nuclease agent or the one or more nucleic acids encoding the nuclease agent. In some such methods, the nucleic acid construct is administered prior to or after the nuclease agent or the one or more nucleic acids encoding the nuclease agent.

[0097] In some such methods, the nucleic acid construct is in the nucleic acid vector. Optionally, the nucleic acid vector is a viral vector. Optionally, the viral vector is administered at a dose of about 3E11 vg/kg to about 5E13 vg/kg. In some such methods, the nucleic acid vector is an adeno-associated viral (AAV) vector. Optionally, the nucleic acid construct is flanked by inverted terminal repeats (ITRs) on each end. Optionally, the ITR on at least one end comprises, consists essentially of, or consists of SEQ ID NO: 283. Optionally, the ITR on each end comprises, consists essentially of, or consists of SEQ ID NO: 283. Optionally, the ITR on at least one end comprises, consists essentially of, or consists of SEQ ID NO: 281. Optionally, the ITR on each end comprises, consists essentially of, or consists of SEQ ID NO: 281. In some such methods, the AAV vector is a single-stranded AAV (ssAAV) vector. In some such methods, the AAV vector is a recombinant AAV8 (rAAV8) vector.

[0098] In some such methods, the polypeptide of interest is a factor IX protein. In some such methods, the factor IX protein coding sequence encodes a factor IX protein comprising SEQ ID NO: 97. In some such methods, the factor IX protein coding sequence comprises or consists of SEQ ID NO: 68, or the factor IX protein coding sequence comprises or consists of SEQ ID NO: 61.

[0099] In some such methods, the nucleic acid construct is a bidirectional construct, wherein the factor IX protein coding sequence is a first factor IX protein coding sequence, and the bidirectional construct further comprises a reverse complement of a second factor IX protein coding sequence, wherein the first factor IX protein coding sequence and the second factor IX protein coding sequence are different but encode the same factor IX protein sequence. In some such methods, the nucleic acid construct comprises from 5′ to 3′: a first splice acceptor, the first factor IX protein coding sequence, a first polyadenylation signal, a reverse complement of a second polyadenylation signal, the reverse complement of the second factor IX protein coding sequence, and a reverse complement of a second splice acceptor, wherein: (i) the first factor IX protein coding sequence comprises SEQ ID NO: 61 and the second factor IX protein coding sequence comprises SEQ ID NO: 68; or (ii) the first factor IX protein coding sequence comprises SEQ ID NO: 68 and the second factor IX protein coding sequence comprises SEQ ID NO: 61, wherein the nucleic acid construct does not comprise a promoter that drives the expression of the factor IX protein, and wherein the nucleic acid construct does not comprise homology arms. In some such methods, the nucleic acid construct comprises SEQ ID NO: 109 or 82 or the reverse complement thereof.

[0100] In some such methods, the nucleic acid construct is a unidirectional construct. In some such methods, the nucleic acid construct is a unidirectional construct comprising the factor IX protein coding sequence, wherein the nucleic acid construct comprises from 5′ to 3′: a splice acceptor, the factor IX protein coding sequence, and a polyadenylation signal, wherein the factor IX protein coding sequence comprises SEQ ID NO: 61 or SEQ ID NO: 68, wherein the nucleic acid construct does not comprise a promoter that drives the expression of the factor IX protein, and wherein the nucleic acid construct does not comprise homology arms.

[0101] In some such methods, the polypeptide of interest is a multidomain therapeutic protein comprising a delivery domain fused to a lysosomal alpha-glucosidase. In some such methods, the lysosomal alpha-glucosidase comprises or consists of the sequence set forth in SEQ ID NO: 296. In some such methods, the lysosomal alpha-glucosidase coding sequence comprises or consist of the sequence set forth in SEQ ID NO: 857.

[0102] In some such methods, the delivery domain is a CD63-binding delivery domain. In some such methods, the CD63-binding delivery domain comprises an anti-CD63 antigen-binding protein. In some such methods, the CD63-binding delivery domain is a single-chain variable fragment (scFv). In some such methods, the scFv comprises or consists of the sequence set forth in SEQ ID NO: 306. In some such methods, the scFv coding sequence comprises or consists of the sequence set forth in SEQ ID NO: 866.

[0103] In some such methods, the multidomain therapeutic protein comprises or consists of the sequence set forth in SEQ ID NO: 316. In some such methods, the coding sequence for the multidomain therapeutic protein comprises or consists of the sequence set forth in SEQ ID NO: 863. Optionally, the nucleic acid construct comprises the sequence set forth in SEQ ID NO: 900 or 884. In some such methods, the nucleic acid construct comprises from 5′ to 3′: a splice acceptor, the coding sequence for the multidomain therapeutic protein, and a polyadenylation signal or sequence, wherein the coding sequence for the multidomain therapeutic protein comprises the sequence set forth in SEQ ID NO: 863. Optionally, the nucleic acid construct comprises the sequence set forth in SEQ ID NO: 900 or 884, wherein the polyadenylation signal comprises a BGH polyadenylation signal and a unidirectional SV40 late polyadenylation signal. Optionally, the BGH polyadenylation signal comprises the sequence set forth in SEQ ID NO: 858 and the unidirectional SV40 late polyadenylation signal comprises the sequence set forth in SEQ ID NO: 859. Optionally, the polyadenylation signal comprising the BGH polyadenylation signal and the unidirectional SV40 late polyadenylation signal comprises the sequence set forth in SEQ ID NO: 902, wherein the nucleic acid construct does not comprise a promoter that drives the expression of the multidomain therapeutic protein, and wherein the nucleic acid construct does not comprise a homology arm.

[0104] In some such methods, the delivery domain is a TfR-binding delivery domain. In some such methods, the TfR-binding delivery domain comprises an anti-TfR antigen-binding protein. In some such methods, the anti-TfR antigen-binding protein comprises a HCVR comprising the HCDR1, HCDR2 and HCDR3 of a HCVR that comprises the amino acid sequence set forth in SEQ ID NO: 555 (or a variant thereof); and a LCVR comprising the LCDR1, LCDR2 and LCDR3 of a LCVR that comprises the amino acid sequence set forth in SEQ ID NO: 560 (or a variant thereof). In some such methods, the anti-TfR antigen-binding protein comprises a HCVR that comprises: an HCDR1 comprising the amino acid sequence set forth in SEQ ID NO: 556 (or a variant thereof), an HCDR2 comprising the amino acid sequence set forth in SEQ ID NO: 557 (or a variant thereof), and an HCDR3 comprising the amino acid sequence set forth in SEQ ID NO: 558 (or a variant thereof); and a LCVR that comprises: an LCDR1 comprising the amino acid sequence set forth in SEQ ID NO: 561 (or a variant thereof), an LCDR2 comprising the amino acid sequence set forth in SEQ ID NO: 562 (or a variant thereof), and an LCDR3 comprising the amino acid sequence set forth in SEQ ID NO: 563 (or a variant thereof). In some such methods, the anti-TfR antigen-binding protein comprises a HCVR that comprises the amino acid sequence set forth in SEQ ID NO: 555 (or a variant thereof); and a LCVR that comprises the amino acid sequence set forth in SEQ ID NO: 560 (or a variant thereof).

[0105] In some such methods, the TfR-binding delivery domain comprises a single-chain variable fragment (scFv). In some such methods, the scFv comprises or consists of the sequence set forth in SEQ ID NO: 672. In some such methods, the scFv coding sequence comprises or consists of the sequence set forth in SEQ ID NO: 713.

[0106] In some such methods, the multidomain therapeutic protein comprises or consists of the sequence set forth in SEQ ID NO: 691. In some such methods, the coding sequence for the multidomain therapeutic protein comprises or consists of the sequence set forth in SEQ ID NO: 852. Optionally, the nucleic acid construct comprises the sequence set forth in SEQ ID NO: 887 or 871. In some such methods, the nucleic acid construct comprises from 5′ to 3′: a splice acceptor, the coding sequence for the multidomain therapeutic protein, and a polyadenylation signal or sequence, wherein the coding sequence for the multidomain therapeutic protein comprises the sequence set forth in SEQ ID NO: 852. Optionally, the nucleic acid construct comprises the sequence set forth in SEQ ID NO: 887 or 871, wherein the polyadenylation signal comprises a BGH polyadenylation signal and a unidirectional SV40 late polyadenylation signal. Optionally, the BGH polyadenylation signal comprises the sequence set forth in SEQ ID NO: 858 and the unidirectional SV40 late polyadenylation signal comprises the sequence set forth in SEQ ID NO: 859. Optionally, the polyadenylation signal comprising the BGH polyadenylation signal and the unidirectional SV40 late polyadenylation signal comprises the sequence set forth in SEQ ID NO: 902, wherein the nucleic acid construct does not comprise a promoter that drives the expression of the multidomain therapeutic protein, and wherein the nucleic acid construct does not comprise a homology arm.

[0107] In some such methods, the polypeptide of interest is a factor VIII protein.

[0108] In some such methods, the polypeptide of interest is an antigen-binding protein. Optionally, the antigen-binding protein is an antibody.

[0109] In some such methods, the target genomic locus is an albumin gene. Optionally, the albumin gene is a human albumin gene. In some such methods, the nuclease target site is in intron 1 of the albumin gene.

[0110] In some such methods, the nuclease agent comprises: (a) a zinc finger nuclease (ZFN); (b) a transcription activator-like effector nuclease (TALEN); or (c) (i) a Cas protein or a nucleic acid encoding the Cas protein; and (ii) a guide RNA or one or more DNAs encoding the guide RNA, wherein the guide RNA comprises a DNA-targeting segment that targets a guide RNA target sequence, and wherein the guide RNA binds to the Cas protein and targets the Cas protein to the guide RNA target sequence.

[0111] In some such methods, the nuclease agent comprises: (a) a Cas protein or a nucleic acid encoding the Cas protein; and (b) a guide RNA or one or more DNAs encoding the guide RNA, wherein the guide RNA comprises a DNA-targeting segment that targets a guide RNA target sequence, and wherein the guide RNA binds to the Cas protein and targets the Cas protein to the guide RNA target sequence. In some such methods, the DNA-targeting segment comprises any one of SEQ ID NOS: 153-184. Optionally, the DNA-targeting segment comprises any one of SEQ ID NOS: 159, 153, 156, and 164, or the DNA-targeting segment consists of any one of SEQ ID NOS: 153-184. Optionally, the DNA-targeting segment consists of any one of SEQ ID NOS: 159, 153, 156, and 164. In some such methods, the guide RNA comprises any one of SEQ ID NOS: 185-248. Optionally, the guide RNA comprises any one of SEQ ID NOS: 191, 223, 185, 217, 188, 220, 196, and 228. In some such methods, the DNA-targeting segment comprises or consists of SEQ ID NO: 159. In some such methods, the guide RNA comprises SEQ ID NO: 191 or 223.

[0112] Some such methods comprise administering the guide RNA in the form of RNA. In some such methods, the guide RNA comprises at least one modification. In some such methods, the at least one modification comprises: (i) phosphorothioate bonds between the first four nucleotides at the 5′ end of the guide RNA; (ii) phosphorothioate bonds between the last four nucleotides at the 3′ end of the guide RNA; (iii) 2′-O-methyl-modified nucleotides at the first three nucleotides at the 5′ end of the guide RNA; and (iv) 2′-O-methyl-modified nucleotides at the last three nucleotides at the 3′ end of the guide RNA. Some such methods comprise administering the guide RNA in the form of RNA, wherein the guide RNA comprises SEQ ID NO: 223, and the guide RNA comprises: (i) phosphorothioate bonds between the first four nucleotides at the 5′ end of the guide RNA; (ii) phosphorothioate bonds between the last four nucleotides at the 3′ end of the guide RNA; (iii) 2′-O-methyl-modified nucleotides at the first three nucleotides at the 5′ end of the guide RNA; and (iv) 2′-O-methyl-modified nucleotides at the last three nucleotides at the 3′ end of the guide RNA.

[0113] In some such methods, the Cas protein is a Cas9 protein. Optionally, the Cas protein is derived from a Streptococcus pyogenes Cas9 protein. In some such methods, the Cas protein comprises the sequence set forth in SEQ ID NO: 134.

[0114] Some such methods comprise administering the nucleic acid encoding the Cas protein, wherein the nucleic acid comprises an mRNA encoding the Cas protein. In some such methods, the mRNA encoding the Cas protein comprises at least one modification. In some such methods, the mRNA encoding the Cas protein is fully substituted with N1-methyl-pseudouridine. In some such methods, the mRNA encoding the Cas protein comprises the sequence set forth in SEQ ID NO: 124 or 125. Some such methods comprise administering the nucleic acid encoding the Cas protein, wherein the nucleic acid comprises an mRNA encoding the Cas protein, the mRNA encoding the Cas protein comprises the sequence set forth in SEQ ID NO: 124 or 125, and the mRNA encoding the Cas protein is fully substituted with N1-methyl-pseudouridine, comprises a 5′ cap, and comprises a poly(A) tail.

[0115] Some such methods comprise administering the guide RNA in the form of RNA, and the guide RNA comprises SEQ ID NO: 191 or 223, and also comprise administering the nucleic acid encoding the Cas protein, wherein the nucleic acid comprises an mRNA encoding the Cas protein, and the mRNA encoding the Cas protein comprises the sequence set forth in SEQ ID NO: 124 or 125. Some such methods comprise administering the guide RNA in the form of RNA, the guide RNA comprises SEQ ID NO: 223, and the guide RNA comprises: (i) phosphorothioate bonds between the first four nucleotides at the 5′ end of the guide RNA; (ii) phosphorothioate bonds between the last four nucleotides at the 3′ end of the guide RNA; (iii) 2′-O-methyl-modified nucleotides at the first three nucleotides at the 5′ end of the guide RNA; and (iv) 2′-O-methyl-modified nucleotides at the last three nucleotides at the 3′ end of the guide RNA, and also comprise administering the nucleic acid encoding the Cas protein, wherein the nucleic acid comprises an mRNA encoding the Cas protein, the mRNA encoding the Cas protein comprises the sequence set forth in SEQ ID NO: 124 or 125, and the mRNA encoding the Cas protein is fully substituted with N1-methyl-pseudouridine, comprises a 5′ cap, and comprises a poly(A) tail.

[0116] In some such methods, the Cas protein or the nucleic acid encoding the Cas protein and the guide RNA or the one or more DNAs encoding the guide RNA are associated with a lipid nanoparticle. In some such methods, the lipid nanoparticle comprises a cationic lipid, a neutral lipid, a helper lipid, and a stealth lipid. In some such methods, the cationic lipid is Lipid A ((9Z,12Z)-3-((4,4-bis(octyloxy)butanoyl)oxy)-2-((((3-(diethylamino)propoxy)carbonyl)oxy)methyl)propyl octadeca-9,12-dienoate), and/or the neutral lipid is distearoylphosphatidylcholine or 1,2-distearoyl-sn-glycero-3-phosphocholine (DSPC), and/or the helper lipid is cholesterol, and/or the stealth lipid is 1,2-dimyristoyl-rac-glycero-3-methoxypolyethylene glycol-2000. In some such methods, the cationic lipid is Lipid A, the neutral lipid is DSPC, the helper lipid is cholesterol, and the stealth lipid is PEG2k-DMG. In some such methods, the lipid nanoparticle comprises four lipids at the following molar ratios: about 50 mol % Lipid A, about 9 mol % DSPC, about 38 mol % cholesterol, and about 3 mol % PEG2k-DMG.

[0117] In some such methods, the cell is a liver cell or a hepatocyte, or the population of cells is a population of liver cells or hepatocytes. In some such methods, the subject is a human subject. In some such methods, the subject is a neonatal subject. In some such methods, the nucleic acid vector is in an adeno-associated viral (AAV) vector, and the subject does not have preexisting AAV immunity.

[0118] In some such methods, the method does not comprise administering a plasma cell depleting agent. In some such methods, the nucleic acid vector is in an adeno-associated viral (AAV) vector, the subject does not have preexisting AAV immunity, and the method does not comprise administering a plasma cell depleting agent.

[0119] In another aspect, provided are compositions or combinations comprising an effective amount of an anti-CD20×CD3 bispecific antibody or functional fragment thereof in combination with: (a) a nucleic acid construct comprising a coding sequence for the polypeptide of interest; and (b) a nuclease agent or one or more nucleic acids encoding the nuclease agent, wherein the nuclease agent targets a nuclease target site in a target genomic locus.

[0120] In some such compositions or combinations, the anti-CD20×CD3 bispecific antibody or functional fragment thereof comprises a first antigen-binding domain that specifically binds to CD20 comprising three heavy chain CDRs (HCDR1, HCDR2 and HCDR3) contained within a heavy chain variable region (HCVR) comprising the amino acid sequence of SEQ ID NO: 44, and three light chain CDRs (LCDR1, LCDR2 and LCDR3) contained within a light chain variable region (LCVR) comprising the amino acid sequence of SEQ ID NO: 45. In some such compositions or combinations, the first antigen-binding domain that specifically binds to CD20 comprises a HCDR1 comprising the amino acid sequence of SEQ ID NO: 47, a HCDR2 comprising the amino acid sequence of SEQ ID NO: 48, a HCDR3 comprising the amino acid sequence of SEQ ID NO: 49, a LCDR1 comprising the amino acid sequence of SEQ ID NO: 50, a LCDR2 comprising the amino acid sequence of SEQ ID NO: 51, and a LCDR3 comprising the amino acid sequence of SEQ ID NO: 52.

[0121] In some such compositions or combinations, the anti-CD20×CD3 bispecific antibody or functional fragment thereof comprises a second antigen-binding domain that specifically binds to CD3 comprising three heavy chain CDRs (HCDR1, HCDR2 and HCDR3) contained within a heavy chain variable region (HCVR) comprising the amino acid sequence of SEQ ID NO: 46, and three light chain CDRs (LCDR1, LCDR2 and LCDR3) contained within a light chain variable region (LCVR) comprising the amino acid sequence of SEQ ID NO: 45. In some such compositions or combinations, the second antigen-binding domain that specifically binds to CD3 comprises a HCDR1 comprising the amino acid sequence of SEQ ID NO: 53, a HCDR2 comprising the amino acid sequence of SEQ ID NO: 54, a HCDR3 comprising the amino acid sequence of SEQ ID NO: 55, a LCDR1 comprising the amino acid sequence of SEQ ID NO: 50, a LCDR2 comprising the amino acid sequence of SEQ ID NO: 51, and a LCDR3 comprising the amino acid sequence of SEQ ID NO: 52.

[0122] In some such compositions or combinations, the anti-CD20×CD3 bispecific antibody or functional fragment thereof comprises: (a) a first antigen-binding domain that comprises HCDR1, HCDR2, and HCDR3 comprising the amino acid sequences of SEQ ID NOS: 47, 48, and 49, respectively, and LCDR1, LCDR2, and LCDR3 comprising the amino acid sequences of SEQ ID NOS: 50, 51, and 52, respectively; and (b) a second antigen-binding domain that comprises HCDR1, HCDR2, and HCDR3 comprising the amino acid sequences of SEQ ID NOS: 53, 54, and 55, respectively, and LCDR1, LCDR2, and LCDR3 comprising the amino acid sequences of SEQ ID NOS: 50, 51, and 52, respectively.

[0123] In some such compositions or combinations, the anti-CD20×CD3 bispecific antibody or functional fragment thereof comprises a human IgG heavy chain constant region. Optionally, the human IgG heavy chain constant region comprises one or more modifications that increase binding to a neonatal Fc receptor (FcRn) and/or the human IgG heavy chain constant region comprises one or more modifications that decrease binding to an Fc-gamma receptor (FcγR). In some such compositions or combinations, the human IgG heavy chain constant region is isotype IgG4 or IgG1.

[0124] In some such compositions or combinations, the nucleic acid construct is in the nucleic acid vector. Optionally, the nucleic acid vector is a viral vector. In some such compositions or combinations, the nucleic acid vector is an adeno-associated viral (AAV) vector. Optionally, the nucleic acid construct is flanked by inverted terminal repeats (ITRs) on each end. Optionally, the ITR on at least one end comprises, consists essentially of, or consists of SEQ ID NO: 283. Optionally, the ITR on each end comprises, consists essentially of, or consists of SEQ ID NO: 283. Optionally, the ITR on at least one end comprises, consists essentially of, or consists of SEQ ID NO: 281. Optionally, the ITR on each end comprises, consists essentially of, or consists of SEQ ID NO: 281. In some such compositions or combinations, the AAV vector is a single-stranded AAV (ssAAV) vector. In some such compositions or combinations, the AAV vector is a recombinant AAV8 (rAAV8) vector.

[0125] In some such compositions or combinations, the polypeptide of interest is a factor IX protein. In some such compositions or combinations, the factor IX protein coding sequence encodes a factor IX protein comprising SEQ ID NO: 97. In some such compositions or combinations, the factor IX protein coding sequence comprises or consists of SEQ ID NO: 68, or the factor IX protein coding sequence comprises or consists of SEQ ID NO: 61.

[0126] In some such compositions or combinations, the nucleic acid construct is a bidirectional construct, wherein the factor IX protein coding sequence is a first factor IX protein coding sequence, and the bidirectional construct further comprises a reverse complement of a second factor IX protein coding sequence, wherein the first factor IX protein coding sequence and the second factor IX protein coding sequence are different but encode the same factor IX protein sequence. In some such compositions or combinations, the nucleic acid construct comprises from 5′ to 3′: a first splice acceptor, the first factor IX protein coding sequence, a first polyadenylation signal, a reverse complement of a second polyadenylation signal, the reverse complement of the second factor IX protein coding sequence, and a reverse complement of a second splice acceptor, wherein: (i) the first factor IX protein coding sequence comprises SEQ ID NO: 61 and the second factor IX protein coding sequence comprises SEQ ID NO: 68; or (ii) the first factor IX protein coding sequence comprises SEQ ID NO: 68 and the second factor IX protein coding sequence comprises SEQ ID NO: 61, wherein the nucleic acid construct does not comprise a promoter that drives the expression of the factor IX protein, and wherein the nucleic acid construct does not comprise homology arms. In some such compositions or combinations, the nucleic acid construct comprises SEQ ID NO: 109 or 82 or the reverse complement thereof.

[0127] In some such compositions or combinations, the nucleic acid construct is a unidirectional construct. In some such compositions or combinations, the nucleic acid construct is a unidirectional construct comprising the factor IX protein coding sequence, wherein the nucleic acid construct comprises from 5′ to 3′: a splice acceptor, the factor IX protein coding sequence, and a polyadenylation signal, wherein the factor IX protein coding sequence comprises SEQ ID NO: 61 or SEQ ID NO: 68, wherein the nucleic acid construct does not comprise a promoter that drives the expression of the factor IX protein, and wherein the nucleic acid construct does not comprise homology arms.

[0128] In some such compositions or combinations, the polypeptide of interest is a multidomain therapeutic protein comprising a delivery domain fused to a lysosomal alpha-glucosidase. In some such compositions or combinations, the lysosomal alpha-glucosidase comprises or consists of the sequence set forth in SEQ ID NO: 296. In some such compositions or combinations, the lysosomal alpha-glucosidase coding sequence comprises or consists of the sequence set forth in SEQ ID NO: 857.

[0129] In some such compositions or combinations, the delivery domain is a CD63-binding delivery domain. In some such compositions or combinations, the CD63-binding delivery domain comprises an anti-CD63 antigen-binding protein. In some such compositions or combinations, the CD63-binding delivery domain is a single-chain variable fragment (scFv). In some such compositions or combinations, the scFv comprises or consists of the sequence set forth in SEQ ID NO: 306. In some such compositions or combinations, the scFv coding sequence comprises or consists of the sequence set forth in SEQ ID NO: 866.

[0130] In some such compositions or combinations, the multidomain therapeutic protein comprises or consists of the sequence set forth in SEQ ID NO: 316. In some such compositions or combinations, the coding sequence for the multidomain therapeutic protein comprises or consists of the sequence set forth in SEQ ID NO: 863. Optionally, the nucleic acid construct comprises the sequence set forth in SEQ ID NO: 900 or 884. In some such compositions or combinations, the nucleic acid construct comprises from 5′ to 3′: a splice acceptor, the coding sequence for the multidomain therapeutic protein, and a polyadenylation signal or sequence, wherein the coding sequence for the multidomain therapeutic protein comprises the sequence set forth in SEQ ID NO: 863. Optionally, the nucleic acid construct comprises the sequence set forth in SEQ ID NO: 900 or 884, wherein the polyadenylation signal comprises a BGH polyadenylation signal and a unidirectional SV40 late polyadenylation signal. Optionally, the BGH polyadenylation signal comprises the sequence set forth in SEQ ID NO: 858 and the unidirectional SV40 late polyadenylation signal comprises the sequence set forth in SEQ ID NO: 859. Optionally, the polyadenylation signal comprising the BGH polyadenylation signal and the unidirectional SV40 late polyadenylation signal comprises the sequence set forth in SEQ ID NO: 902, wherein the nucleic acid construct does not comprise a promoter that drives the expression of the multidomain therapeutic protein, and wherein the nucleic acid construct does not comprise a homology arm.

[0131] In some such compositions or combinations, the delivery domain is a TfR-binding delivery domain. In some such compositions or combinations, the TfR-binding delivery domain comprises an anti-TfR antigen-binding protein. In some such compositions or combinations, the anti-TfR antigen-binding protein comprises a HCVR comprising the HCDR1, HCDR2 and HCDR3 of a HCVR that comprises the amino acid sequence set forth in SEQ ID NO: 555 (or a variant thereof); and a LCVR comprising the LCDR1, LCDR2 and LCDR3 of a LCVR that comprises the amino acid sequence set forth in SEQ ID NO: 560 (or a variant thereof). In some such compositions or combinations, the anti-TfR antigen-binding protein comprises a HCVR that comprises: an HCDR1 comprising the amino acid sequence set forth in SEQ ID NO: 556 (or a variant thereof), an HCDR2 comprising the amino acid sequence set forth in SEQ ID NO: 557 (or a variant thereof), and an HCDR3 comprising the amino acid sequence set forth in SEQ ID NO: 558 (or a variant thereof); and a LCVR that comprises: an LCDR1 comprising the amino acid sequence set forth in SEQ ID NO: 561 (or a variant thereof), an LCDR2 comprising the amino acid sequence set forth in SEQ ID NO: 562 (or a variant thereof), and an LCDR3 comprising the amino acid sequence set forth in SEQ ID NO: 563 (or a variant thereof). In some such compositions or combinations, the anti-TfR antigen-binding protein comprises a HCVR that comprises the amino acid sequence set forth in SEQ ID NO: 555 (or a variant thereof); and a LCVR that comprises the amino acid sequence set forth in SEQ ID NO: 560 (or a variant thereof).

[0132] In some such compositions or combinations, the TfR-binding delivery domain comprises a single-chain variable fragment (scFv). In some such compositions or combinations, the scFv comprises or consists of the sequence set forth in SEQ ID NO: 672. In some such compositions or combinations, the scFv coding sequence comprises or consists of the sequence set forth in SEQ ID NO: 713.

[0133] In some such compositions or combinations, the multidomain therapeutic protein comprises or consists of the sequence set forth in SEQ ID NO: 691. In some such compositions or combinations, the coding sequence for the multidomain therapeutic protein comprises or consists of the sequence set forth in SEQ ID NO: 852. Optionally, the nucleic acid construct comprises the sequence set forth in SEQ ID NO: 887 or 871. In some such compositions or combinations, the nucleic acid construct comprises from 5′ to 3′: a splice acceptor, the coding sequence for the multidomain therapeutic protein, and a polyadenylation signal or sequence, wherein the coding sequence for the multidomain therapeutic protein comprises the sequence set forth in SEQ ID NO: 852. Optionally, the nucleic acid construct comprises the sequence set forth in SEQ ID NO: 887 or 871, wherein the polyadenylation signal comprises a BGH polyadenylation signal and a unidirectional SV40 late polyadenylation signal. Optionally, the BGH polyadenylation signal comprises the sequence set forth in SEQ ID NO: 858 and the unidirectional SV40 late polyadenylation signal comprises the sequence set forth in SEQ ID NO: 859. Optionally, the polyadenylation signal comprising the BGH polyadenylation signal and the unidirectional SV40 late polyadenylation signal comprises the sequence set forth in SEQ ID NO: 902, wherein the nucleic acid construct does not comprise a promoter that drives the expression of the multidomain therapeutic protein, and wherein the nucleic acid construct does not comprise a homology arm.

[0134] In some such compositions or combinations, the polypeptide of interest is a factor VIII protein.

[0135] In some such compositions or combinations, the polypeptide of interest is an antigen-binding protein. Optionally, the antigen-binding protein is an antibody.

[0136] In some such compositions or combinations, the target genomic locus is an albumin gene. Optionally, the albumin gene is a human albumin gene. In some such compositions or combinations, the nuclease target site is in intron 1 of the albumin gene.

[0137] In some such compositions or combinations, the nuclease agent comprises: (a) a zinc finger nuclease (ZFN); (b) a transcription activator-like effector nuclease (TALEN); or (c) (i) a Cas protein or a nucleic acid encoding the Cas protein; and (ii) a guide RNA or one or more DNAs encoding the guide RNA, wherein the guide RNA comprises a DNA-targeting segment that targets a guide RNA target sequence, and wherein the guide RNA binds to the Cas protein and targets the Cas protein to the guide RNA target sequence.

[0138] In some such compositions or combinations, the nuclease agent comprises: (a) a Cas protein or a nucleic acid encoding the Cas protein; and (b) a guide RNA or one or more DNAs encoding the guide RNA, wherein the guide RNA comprises a DNA-targeting segment that targets a guide RNA target sequence, and wherein the guide RNA binds to the Cas protein and targets the Cas protein to the guide RNA target sequence. In some such compositions or combinations, the DNA-targeting segment comprises any one of SEQ ID NOS: 153-184. Optionally, the DNA-targeting segment comprises any one of SEQ ID NOS: 159, 153, 156, and 164, or the DNA-targeting segment consists of any one of SEQ ID NOS: 153-184. Optionally, the DNA-targeting segment consists of any one of SEQ ID NOS: 159, 153, 156, and 164. In some such compositions or combinations, the guide RNA comprises any one of SEQ ID NOS: 185-248. Optionally, the guide RNA comprises any one of SEQ ID NOS: 191, 223, 185, 217, 188, 220, 196, and 228. In some such compositions or combinations, the DNA-targeting segment comprises or consists of SEQ ID NO: 159. In some such compositions or combinations, the guide RNA comprises SEQ ID NO: 191 or 223.

[0139] Some such compositions or combinations comprise the guide RNA in the form of RNA. In some such compositions or combinations, the guide RNA comprises at least one modification. In some such compositions or combinations, the at least one modification comprises: (i) phosphorothioate bonds between the first four nucleotides at the 5′ end of the guide RNA; (ii) phosphorothioate bonds between the last four nucleotides at the 3′ end of the guide RNA; (iii) 2′-O-methyl-modified nucleotides at the first three nucleotides at the 5′ end of the guide RNA; and (iv) 2′-O-methyl-modified nucleotides at the last three nucleotides at the 3′ end of the guide RNA. Some such compositions or combinations comprise the guide RNA in the form of RNA, the guide RNA comprises SEQ ID NO: 223, and the guide RNA comprises: (i) phosphorothioate bonds between the first four nucleotides at the 5′ end of the guide RNA; (ii) phosphorothioate bonds between the last four nucleotides at the 3′ end of the guide RNA; (iii) 2′-O-methyl-modified nucleotides at the first three nucleotides at the 5′ end of the guide RNA; and (iv) 2′-O-methyl-modified nucleotides at the last three nucleotides at the 3′ end of the guide RNA.

[0140] In some such compositions or combinations, the Cas protein is a Cas9 protein. Optionally, the Cas protein is derived from a Streptococcus pyogenes Cas9 protein. In some such compositions or combinations, the Cas protein comprises the sequence set forth in SEQ ID NO: 134.

[0141] Some such compositions or combinations comprise the nucleic acid encoding the Cas protein, wherein the nucleic acid comprises an mRNA encoding the Cas protein. In some such compositions or combinations, the mRNA encoding the Cas protein comprises at least one modification. In some such compositions or combinations, the mRNA encoding the Cas protein is fully substituted with N1-methyl-pseudouridine. In some such compositions or combinations, the mRNA encoding the Cas protein comprises the sequence set forth in SEQ ID NO: 124 or 125. Some such compositions or combinations comprise the nucleic acid encoding the Cas protein, wherein the nucleic acid comprises an mRNA encoding the Cas protein, the mRNA encoding the Cas protein comprises the sequence set forth in SEQ ID NO: 124 or 125, and the mRNA encoding the Cas protein is fully substituted with N1-methyl-pseudouridine, comprises a 5′ cap, and comprises a poly(A) tail.

[0142] Some such compositions or combinations comprise the guide RNA in the form of RNA, and the guide RNA comprises SEQ ID NO: 191 or 223, and the composition or combination comprises administering the nucleic acid encoding the Cas protein, wherein the nucleic acid comprises an mRNA encoding the Cas protein, and the mRNA encoding the Cas protein comprises the sequence set forth in SEQ ID NO: 124 or 125. Some such compositions or combinations comprise the guide RNA in the form of RNA, the guide RNA comprises SEQ ID NO: 223, and the guide RNA comprises: (i) phosphorothioate bonds between the first four nucleotides at the 5′ end of the guide RNA; (ii) phosphorothioate bonds between the last four nucleotides at the 3′ end of the guide RNA; (iii) 2′-O-methyl-modified nucleotides at the first three nucleotides at the 5′ end of the guide RNA; and (iv) 2′-O-methyl-modified nucleotides at the last three nucleotides at the 3′ end of the guide RNA, and the composition or combination comprises the nucleic acid encoding the Cas protein, wherein the nucleic acid comprises an mRNA encoding the Cas protein, the mRNA encoding the Cas protein comprises the sequence set forth in SEQ ID NO: 124 or 125, and the mRNA encoding the Cas protein is fully substituted with N1-methyl-pseudouridine, comprises a 5′ cap, and comprises a poly(A) tail.

[0143] In some such compositions or combinations, the Cas protein or the nucleic acid encoding the Cas protein and the guide RNA or the one or more DNAs encoding the guide RNA are associated with a lipid nanoparticle. In some such compositions or combinations, the lipid nanoparticle comprises a cationic lipid, a neutral lipid, a helper lipid, and a stealth lipid. In some such compositions or combinations, the cationic lipid is Lipid A ((9Z,12Z)-3-((4,4-bis(octyloxy)butanoyl)oxy)-2-((((3-(diethylamino)propoxy)carbonyl)oxy)methyl)propyl octadeca-9,12-dienoate), and/or the neutral lipid is distearoylphosphatidylcholine or 1,2-distearoyl-sn-glycero-3-phosphocholine (DSPC), and/or the helper lipid is cholesterol, and/or the stealth lipid is 1,2-dimyristoyl-rac-glycero-3-methoxypolyethylene glycol-2000. In some such compositions or combinations, the cationic lipid is Lipid A, the neutral lipid is DSPC, the helper lipid is cholesterol, and the stealth lipid is PEG2k-DMG. In some such compositions or combinations, the lipid nanoparticle comprises four lipids at the following molar ratios: about 50 mol % Lipid A, about 9 mol % DSPC, about 38 mol % cholesterol, and about 3 mol % PEG2k-DMG.

[0144] In some such compositions or combinations, the composition or combination does not comprise a plasma cell depleting agent.

[0145] In another aspect, the compositions or combinations described herein are provided for use in a method of inserting a nucleic acid encoding a polypeptide of interest into a target genomic locus in a cell or a population of cells in a subject.

[0146] In another aspect, the compositions or combinations described herein are provided for use in a method of expressing a polypeptide of interest from a target genomic locus in a cell or a population of cells in a subject.

[0147] In another aspect, the compositions or combinations described herein are provided for use in a method of treating an enzyme deficiency in a subject in need thereof.

[0148] In another aspect, the compositions or combinations described herein are provided for use in a method of preventing or reducing the onset of a sign or symptom of an enzyme deficiency in a subject in need thereof.

[0149] In another aspect, provided are kits comprising the compositions or combinations described herein.

[0150] In another aspect, provided is an anti-CD20×CD3 bispecific antibody or functional fragment thereof for use in the methods described herein.

### BRIEF DESCRIPTION OF THE FIGURES

[0151] FIG. 1 shows an experimental timeline for the study described in Examples 1, 2, 3, and 11.

[0152] FIG. 2 shows the effect of plasma cell depletion with anti-BCMA×CD3 bispecific antibody, FcRn blockade via efgartigimod alfa, B cell depletion with anti-CD19 and anti-CD20 antibodies (anti-CD19/CD20 antibodies), or combination thereof, on anti-AAV8 capsid IgG titers over time in mice previously treated with recombinant AAV8 vector.

[0153] FIG. 3 shows the effect of plasma cell depletion with anti-BCMA×CD3 bispecific antibody, FcRn blockade via efgartigimod alfa, B cell depletion with anti-CD19/CD20 antibodies, or combination thereof, on liver transduction 10 days following administration of a second AAV8 vector in mice previously treated with recombinant AAV8 vector, as measured by Taqman quantitative real-time polymerase chain reaction (PCR) of green fluorescent protein (GFP) transgene DNA.

[0154] FIG. 4 shows the effect of plasma cell depletion with anti-BCMA×CD3 bispecific antibody, FcRn blockade via efgartigimod alfa, B cell depletion with anti-CD19/CD20 antibodies, or combination thereof, on liver transduction 10 days following administration of a second recombinant AAV8 vector in mice previously treated with a first recombinant AAV8 vector, as measured by Taqman quantitative real-time reverse-transcription PCR of GFP transgene RNA.

[0155] FIGS. 5A-5B show the effect of plasma cell depletion with anti-BCMA×CD3 bispecific antibody, FcRn blockade via efgartigimod alfa, B cell depletion with anti-CD19/CD20 antibodies, or combination thereof, on liver transduction 10 days following administration of a second recombinant AAV8 vector in mice previously treated with a first recombinant AAV8 vector, as measured by GFP immunohistochemical (IHC) staining of formalin-fixed paraffin embedded liver sections. FIG. 5A shows GFP-positive area quantified using HALO software (Indica labs). FIG. 5B shows representative images.

[0156] FIGS. 6A-6J show flow cytometry analysis of B cell and plasma cell frequencies and counts in bone marrow and spleen following treatment with anti-BCMA×CD3 bispecific antibody, FcRn blockade, anti-CD19/CD20 antibodies, or combinations thereof. FIG. 6A shows bone marrow plasma cell frequencies, FIG. 6B shows spleen plasma cell frequencies, FIG. 6C shows spleen naïve B cell frequencies, FIG. 6D shows spleen total memory B cell frequencies, FIG. 6E shows spleen AAV-specific memory B cell frequencies, FIG. 6F shows bone marrow plasma cell counts, FIG. 6G shows spleen plasma cell counts, FIG. 6H shows spleen naïve B cell counts, FIG. 6I shows spleen total memory B cell counts, and FIG. 6J shows spleen AAV-specific memory B cell counts.

[0157] FIG. 7 shows the effect of efgartigimod on serum drug concentration of REGN5458 (BCMA×CD3).

[0158] FIG. 8 shows an experimental timeline for the study described in Example 12.

[0159] FIGS. 9A-9B show the effect of plasma cell depletion, B cell depletion, neonatal Fc receptor blockade, and combinations thereof, on naturally-occurring anti-AAV antibody titers in cynomolgus macaques. AAV8 neutralizing antibody (NAb) titer levels are presented for each treatment group over the duration of the study (FIG. 9A) and specifically at Study Day 29 (FIG. 9B).

[0160] FIG. 10 shows an experimental timeline for the study described in Examples 13 and 14.

[0161] FIGS. 11A-11C show a comparison of the effect of CD20×CD3-mediated versus anti-CD20-mediated B cell depletion on the development of anti-AAV IgM antibody titers (FIG. 11A) and anti-AAV IgG antibody titers (FIGS. 11B-11C) in mice.

[0162] FIGS. 12A-12C show a comparison of the effect of CD20×CD3-mediated versus anti-CD20-mediated B cell depletion on AAV transduction (FIG. 12A) and transgene expression (FIGS. 12B-12C) following vector re-administration in mice.

[0163] FIG. 13 shows an experimental timeline for the study described in Examples 15 and 16.

[0164] FIGS. 14A-14F show the effect of prophylactic CD20×CD3-mediated B cell depletion on serum anti-AAV8 IgM (FIG. 14A and FIG. 14D), IgG (FIG. 14B and FIG. 14E), and neutralizing antibody (nAb) (FIG. 14C and FIG. 14F) titers in cynomolgus macaques.

[0165] FIGS. 15A-15C show the effect of prophylactic CD20×CD3-mediated B cell depletion on AAV transduction (FIG. 15A) and transgene expression (FIGS. 15B-15C) following AAV vector re-administration in cynomolgus macaques.

### DEFINITIONS

[0166] The terms “protein,” “polypeptide,” and “peptide,” used interchangeably herein, include polymeric forms of amino acids of any length, including coded and non-coded amino acids and chemically or biochemically modified or derivatized amino acids. The terms also include polymers that have been modified, such as polypeptides having modified peptide backbones. The term “domain” refers to any part of a protein or polypeptide having a particular function or structure.

[0167] The terms “nucleic acid” and “polynucleotide,” used interchangeably herein, include polymeric forms of nucleotides of any length, including ribonucleotides, deoxyribonucleotides, or analogs or modified versions thereof. They include single-, double-, and multi-stranded DNA or RNA, genomic DNA, cDNA, DNA-RNA hybrids, and polymers comprising purine bases, pyrimidine bases, or other natural, chemically modified, biochemically modified, non-natural, or derivatized nucleotide bases.

[0168] The term “expression vector” or “expression construct” or “expression cassette” refers to a recombinant nucleic acid containing a desired coding sequence operably linked to appropriate nucleic acid sequences necessary for the expression of the operably linked coding sequence in a particular host cell or organism. Nucleic acid sequences necessary for expression in prokaryotes usually include a promoter, an operator (optional), and a ribosome binding site, as well as other sequences. Eukaryotic cells are generally known to utilize promoters, enhancers, and termination and polyadenylation signals, although some elements may be deleted and other elements added without sacrificing the necessary expression.

[0169] The term “viral vector” refers to a recombinant nucleic acid that includes at least one element of viral origin and includes elements sufficient for or permissive of packaging into a viral vector particle. The vector and/or particle can be utilized for the purpose of transferring DNA, RNA, or other nucleic acids into cells either ex vivo or in vivo. Numerous forms of viral vectors are known.

[0170] The term “isolated” with respect to proteins, nucleic acids, and cells includes proteins, nucleic acids, and cells that are relatively purified with respect to other cellular or organism components that may normally be present in situ, up to and including a substantially pure preparation of the protein, nucleic acid, or cell. The term “isolated” may include proteins and nucleic acids that have no naturally occurring counterpart or proteins or nucleic acids that have been chemically synthesized and are thus substantially uncontaminated by other proteins or nucleic acids. The term “isolated” may include proteins, nucleic acids, or cells that have been separated or purified from most other cellular components or organism components with which they are naturally accompanied (e.g., but not limited to, other cellular proteins, nucleic acids, or cellular or extracellular components).

[0171] The term “wild type” or “wild-type” includes entities having a structure and/or activity as found in a normal (as contrasted with mutant, diseased, altered, or so forth) state or context. Wild type genes and polypeptides often exist in multiple different forms (e.g., alleles).

[0172] The term “endogenous sequence” refers to a nucleic acid sequence that occurs naturally within a cell or animal. For example, an endogenous ALB sequence of an animal refers to a native ALB sequence that naturally occurs at the ALB locus in the animal.

[0173] “Exogenous” molecules or sequences include molecules or sequences that are not normally present in a cell in that form or that are introduced into a cell from an outside source. Normal presence includes presence with respect to the particular developmental stage and environmental conditions of the cell. An exogenous molecule or sequence, for example, can include a mutated version of a corresponding endogenous sequence within the cell, such as a humanized version of the endogenous sequence, or can include a sequence corresponding to an endogenous sequence within the cell but in a different form (i.e., not within a chromosome). In contrast, endogenous molecules or sequences include molecules or sequences that are normally present in that form in a particular cell at a particular developmental stage under particular environmental conditions.

[0174] The term “heterologous” when used in the context of a nucleic acid or a protein indicates that the nucleic acid or protein comprises at least two segments that do not naturally occur together in the same molecule. For example, the term “heterologous,” when used with reference to segments of a nucleic acid or segments of a protein, indicates that the nucleic acid or protein comprises two or more sub-sequences that are not found in the same relationship to each other (e.g., joined together) in nature. As one example, a “heterologous” region of a nucleic acid vector is a segment of nucleic acid within or attached to another nucleic acid molecule that is not found in association with the other molecule in nature. For example, a heterologous region of a nucleic acid vector could include a coding sequence flanked by a heterologous promoter not found in association with the coding sequence in nature. Likewise, a “heterologous” region of a protein is a segment of amino acids within or attached to another peptide molecule that is not found in association with the other peptide molecule in nature (e.g., a fusion protein, or a protein with a tag). Similarly, a nucleic acid or protein can comprise a heterologous label or a heterologous secretion or localization sequence.

[0175] “Codon optimization” takes advantage of the degeneracy of codons, as exhibited by the multiplicity of three-base pair codon combinations that specify an amino acid, and generally includes a process of modifying a nucleic acid sequence for enhanced expression in particular host cells by replacing at least one codon of the native sequence with a codon that is more frequently or most frequently used in the genes of the host cell while maintaining the native amino acid sequence. For example, a nucleic acid encoding a protein can be modified to substitute codons having a higher frequency of usage in a given prokaryotic or eukaryotic cell, including a bacterial cell, a yeast cell, a human cell, a non-human cell, a mammalian cell, a rodent cell, a mouse cell, a rat cell, a hamster cell, or any other host cell, as compared to the naturally occurring nucleic acid sequence. Codon usage tables are readily available, for example, at the “Codon Usage Database.” These tables can be adapted in a number of ways. See Nakamura et al. (2000) Nucleic Acids Research 28:292, herein incorporated by reference in its entirety for all purposes. Computer algorithms for codon optimization of a particular sequence for expression in a particular host are also available (see, e.g., Gene Forge).

[0176] A “promoter” is a regulatory region of DNA usually comprising a TATA box capable of directing RNA polymerase II to initiate RNA synthesis at the appropriate transcription initiation site for a particular polynucleotide sequence. A promoter may additionally comprise other regions which influence the transcription initiation rate. The promoter sequences disclosed herein modulate transcription of an operably linked polynucleotide. A promoter can be active in one or more of the cell types disclosed herein (e.g., a eukaryotic cell, a non-human mammalian cell, a human cell, a rodent cell, a pluripotent cell, a one-cell stage embryo, a differentiated cell, or a combination thereof). A promoter can be, for example, a constitutively active promoter, a conditional promoter, an inducible promoter, a temporally restricted promoter (e.g., a developmentally regulated promoter), or a spatially restricted promoter (e.g., a cell-specific or tissue-specific promoter). Examples of promoters can be found, for example, in WO 2013/176772, herein incorporated by reference in its entirety for all purposes.

[0177] A constitutive promoter is one that is active in all tissues or particular tissues at all developing stages. Examples of constitutive promoters include the human cytomegalovirus immediate early (hCMV), mouse cytomegalovirus immediate early (mCMV), human elongation factor 1 alpha (hEF1α), mouse elongation factor 1 alpha (mEF1α), mouse phosphoglycerate kinase (PGK), chicken beta actin hybrid (CAG or CBh), SV40 early, and beta 2 tubulin promoters.

[0178] Examples of inducible promoters include, for example, chemically regulated promoters and physically-regulated promoters. Chemically regulated promoters include, for example, alcohol-regulated promoters (e.g., an alcohol dehydrogenase (alcA) gene promoter), tetracycline (tet)-regulated promoters (e.g., a tetracycline-responsive promoter, a tetracycline operator sequence (tetO), a tet-On promoter, or a tet-Off promoter), steroid-regulated promoters (e.g., a rat glucocorticoid receptor, a promoter of an estrogen receptor, or a promoter of an ecdysone receptor), or metal-regulated promoters (e.g., a metalloprotein promoter). Physically regulated promoters include, for example temperature-regulated promoters (e.g., a heat shock promoter) and light-regulated promoters (e.g., a light-inducible promoter or a light-repressible promoter).

[0179] Tissue-specific promoters can be, for example, neuron-specific promoters or glial-specific promoters or muscle-specific promoters or liver-specific promoters.

[0180] Developmentally regulated promoters include, for example, promoters active only during an embryonic stage of development, or only in an adult cell.

[0181] “Operable linkage” or being “operably linked” includes juxtaposition of two or more components (e.g., a promoter and another sequence element) such that both components function normally and allow the possibility that at least one of the components can mediate a function that is exerted upon at least one of the other components. For example, a promoter can be operably linked to a coding sequence if the promoter controls the level of transcription of the coding sequence in response to the presence or absence of one or more transcriptional regulatory factors. Operable linkage can include such sequences being contiguous with each other or acting in trans (e.g., a regulatory sequence can act at a distance to control transcription of the coding sequence).

[0182] The term “in vitro” includes artificial environments and to processes or reactions that occur within an artificial environment (e.g., a test tube or an isolated cell or cell line). The term “in vivo” includes natural environments (e.g., a cell, organism, or body) and to processes or reactions that occur within a natural environment. The term “ex vivo” includes cells that have been removed from the body of an individual and processes or reactions that occur within such cells.

[0183] The term “antigen-binding molecule” includes antibodies and antigen-binding fragments of antibodies, including multispecific antibodies, e.g., bispecific antibodies.

[0184] The term “antibody,” as used herein, refers to an antigen-binding molecule or molecular complex comprising a set of complementarity determining regions (CDRs) that specifically bind to or interact with a particular antigen (e.g., BCMA, CD20, CD3). The term “antibody,” as used herein, includes immunoglobulin molecules comprising four polypeptide chains, two heavy (H) chains and two light (L) chains inter-connected by disulfide bonds, as well as multimers thereof (e.g., IgM). In a typical antibody, each heavy chain comprises a heavy chain variable region (abbreviated herein as HCVR or V_{H}) and a heavy chain constant region. The heavy chain constant region comprises three domains, C_{H}1, C_{H}2 and C_{H}3. Each light chain comprises a light chain variable region (abbreviated herein as LCVR or V_{L}) and a light chain constant region. The light chain constant region comprises one domain (C_{L}1). The V_{H} and V_{L} regions can be further subdivided into regions of hypervariability, termed complementarity determining regions (CDRs), interspersed with regions that are more conserved, termed framework regions (FR). Each V_{H} and V_{L} is composed of three CDRs and four FRs, arranged from amino-terminus to carboxy-terminus in the following order: FR1, CDR1, FR2, CDR2, FR3, CDR3, FR4. In some embodiments, the FRs of the antibody (or antigen-binding portion thereof) may be identical to the human germline sequences, or may be naturally or artificially modified. An amino acid consensus sequence may be defined based on a side-by-side analysis of two or more CDRs.

[0185] Methods and techniques for identifying CDRs within HCVR and LCVR amino acid sequences are well known in the art and can be used to identify CDRs within the specified HCVR and/or LCVR amino acid sequences disclosed herein. Exemplary conventions that can be used to identify the boundaries of CDRs include, but are not limited to, the Kabat definition, the Chothia definition, the AbM definition (enhanced Chothia or Martin), the IMGT definition, and the Honneger definition (AHo). In general terms, the Kabat definition is based on sequence variability, the Chothia definition is based on the location of the structural loop regions, and the AbM definition is a compromise between the Kabat and Chothia approaches. See, e.g., Kabat et al., “Sequences of Proteins of Immunological Interest,” National Institutes of Health, Bethesda, Md. (1991); Chothia et al., J Mol Biol (1987), 4:901-17; Al-Lazikani et al., J. Mol. Biol. 273:927-948 (1997); and Martin et al., Proc. Natl. Acad. Sci. USA 86:9268-9272 (1989); see also, Dondelinger et al., Front. Immunol. (2018), 9:2278, doi:10.3389/fimmu.2018.02278. Public databases are also available for identifying CDR sequences within an antibody.

[0186] The term “antibody,” as used herein, also includes antigen-binding fragments of full antibody molecules. The terms “antigen-binding portion” of an antibody, “antigen-binding fragment” of an antibody, “antigen-binding domain,” and the like, as used herein, include any naturally occurring, enzymatically obtainable, synthetic, or genetically engineered polypeptide or glycoprotein that specifically binds an antigen to form a complex. Antigen-binding fragments of an antibody may be derived, e.g., from full antibody molecules using any suitable standard techniques such as proteolytic digestion or recombinant genetic engineering techniques involving the manipulation and expression of DNA encoding antibody variable and optionally constant domains. Such DNA is known and/or is readily available from, e.g., commercial sources, DNA libraries (including, e.g., phage-antibody libraries), or can be synthesized. The DNA may be sequenced and manipulated chemically or by using molecular biology techniques, for example, to arrange one or more variable and/or constant domains into a suitable configuration, or to introduce codons, create cysteine residues, modify, add, or delete amino acids, etc.

[0187] Non-limiting examples of antigen-binding fragments include: (i) Fab fragments; (ii) F(ab′)2 fragments; (iii) Fd fragments; (iv) Fv fragments; (v) single-chain Fv (scFv) molecules; (vi) dAb fragments; and (vii) minimal recognition units consisting of the amino acid residues that mimic the hypervariable region of an antibody (e.g., an isolated complementarity determining region (CDR) such as a CDR3 peptide), or a constrained FR3-CDR3-FR4 peptide. Other engineered molecules, such as domain-specific antibodies, single domain antibodies, domain-deleted antibodies, chimeric antibodies, CDR-grafted antibodies, diabodies, triabodies, tetrabodies, minibodies, nanobodies (e.g., monovalent nanobodies, bivalent nanobodies, etc.), small modular immunopharmaceuticals (SMIPs), and shark variable IgNAR domains, are also encompassed within the expression “antigen-binding fragment,” as used herein.

[0188] An antigen-binding fragment of an antibody will typically comprise at least one variable domain. The variable domain may be of any size or amino acid composition and will generally comprise at least one CDR which is adjacent to or in frame with one or more framework sequences. In antigen-binding fragments having a V_{H} domain associated with a V_{L} domain, the V_{H} and V_{L} domains may be situated relative to one another in any suitable arrangement. For example, the variable region may be dimeric and contain V_{H}-V_{H}, V_{H}-V_{L} or V_{L}-V_{L} dimers. Alternatively, the antigen-binding fragment of an antibody may contain a monomeric V_{H} or V_{L} domain.

[0189] In certain embodiments, an antigen-binding fragment of an antibody may contain at least one variable domain covalently linked to at least one constant domain. Non-limiting, exemplary configurations of variable and constant domains that may be found within an antigen-binding fragment of an antibody include: (i) V_{H}-C_{H}1; (ii) V_{H}-C_{H}2; (iii) V_{H}-C_{H}3; (iv) V_{H}-C_{H}1-C_{H}2; (v) V_{H}-C_{H}1-C_{H}2-C_{H}3; (vi) V_{H}-C_{H}2-C_{H}3; (vii) V_{H}-C_{L}; (viii) V_{L}-C_{H}1; (ix) V_{L}-C_{H}2; (x) V_{L}-C_{H}3; (xi) V_{L}-C_{H}1-C_{H}2; (xii) V_{L}-C_{H}1-C_{H}2-C_{H}3; (xiii) V_{L}-C_{H}2-C_{H}3; and (xiv) V_{L}-C_{L}. In any configuration of variable and constant domains, including any of the exemplary configurations listed above, the variable and constant domains may be either directly linked to one another or may be linked by a full or partial hinge or linker region. A hinge region may consist of at least 2 (e.g., 5, 10, 15, 20, 40, 60 or more) amino acids which result in a flexible or semi-flexible linkage between adjacent variable and/or constant domains in a single polypeptide molecule. Moreover, an antigen-binding fragment of an antibody may comprise a homo-dimer or hetero-dimer (or other multimer) of any of the variable and constant domain configurations listed above in non-covalent association with one another and/or with one or more monomeric V_{H} or V_{L} domain (e.g., by disulfide bond(s)).

[0190] The term “antibody,” as used herein, also includes multispecific (e.g., bispecific) antibodies. A multispecific antibody or antigen-binding fragment of an antibody will typically comprise at least two different variable domains, wherein each variable domain is capable of specifically binding to a separate antigen or to a different epitope on the same antigen.

[0191] Any multispecific antibody format may be adapted for use in the context of an antibody or antigen-binding fragment of an antibody of the present disclosure using routine techniques available in the art. For example, the present disclosure includes bispecific antibodies wherein one arm of an immunoglobulin is specific for an epitope of BCMA or CD20 and the other arm of the immunoglobulin is specific for an epitope of CD3. Exemplary bispecific formats that can be used in the context of the present disclosure include, without limitation, e.g., scFv-based or diabody bispecific formats, IgG-scFv fusions, dual variable domain (DVD)-Ig, Quadroma, knobs-into-holes, common light chain (e.g., common light chain with knobs-into-holes, etc.), CrossMab, CrossFab, (SEED) body, leucine zipper, Duobody, IgG1/IgG2, dual acting Fab (DAF)-IgG, and Mab² bispecific formats (see, e.g., Klein et al. 2012, mAbs 4:6, 1-11, and references cited therein, for a review of the foregoing formats). Bispecific antibodies can also be constructed using peptide/nucleic acid conjugation, e.g., wherein unnatural amino acids with orthogonal chemical reactivity are used to generate site-specific antibody-oligonucleotide conjugates which then self-assemble into multimeric complexes with defined composition, valency, and geometry. See, e.g., Kazane et al., J. Am. Chem. Soc. (Epub: Dec. 4, 2012).

[0192] The term “human antibody,” as used herein, is intended to include antibodies having variable and constant regions derived from human germline immunoglobulin sequences. The human antibodies of the disclosure may nonetheless include amino acid residues not encoded by human germline immunoglobulin sequences (e.g., mutations introduced by random or site-specific mutagenesis in vitro or by somatic mutation in vivo), for example in the CDRs and in particular CDR3. However, the term “human antibody,” as used herein, is not intended to include antibodies in which CDR sequences derived from the germline of another mammalian species, such as a mouse, have been grafted onto human framework sequences.

[0193] The term “recombinant antibody,” as used herein, is intended to include all antibodies that are prepared, expressed, created, or isolated by recombinant means. The term includes, but is not limited to, antibodies expressed using a recombinant expression vector transfected into a host cell (e.g., Chinese hamster ovary (CHO) cell) or cellular expression system, antibodies isolated from a recombinant, combinatorial human antibody library, and antibodies isolated from a non-human animal (e.g., a mouse, such as a mouse that is transgenic for human immunoglobulin genes (see, e.g., Taylor et al. (1992) Nucl. Acids Res. 20:6287-6295). In some embodiments, the recombinant antibody is a recombinant human antibody. In some embodiments, recombinant human antibodies have variable and constant regions derived from human germline immunoglobulin sequences. In certain embodiments, however, such recombinant human antibodies are subjected to in vitro mutagenesis (or, when an animal transgenic for human Ig sequences is used, in vivo somatic mutagenesis) and thus the amino acid sequences of the V_{H} and V_{L} regions of the recombinant antibodies are sequences that, while derived from and related to human germline V_{H} and V_{L} sequences, may not naturally exist within the human antibody germline repertoire in vivo.

[0194] An “isolated antibody” refers to an antibody that has been identified and separated and/or recovered from at least one component of its natural environment. For example, an antibody that has been separated or removed from at least one component of an organism, or from a tissue or cell in which the antibody naturally exists or is naturally produced, is an “isolated antibody.” An isolated antibody also includes an antibody in situ within a recombinant cell. Isolated antibodies are antibodies that have been subjected to at least one purification or isolation step. According to certain embodiments, an isolated antibody may be substantially free of other cellular material and/or chemicals.

[0195] The term “specifically binds,” or the like, means that an antibody or antigen-binding fragment thereof forms a complex with an antigen that is relatively stable under physiologic conditions. Specific binding can be characterized by an equilibrium dissociation constant of at least about 1×10⁻⁶ M or less, e.g., 10⁻⁷ M, 10⁻⁸ M, 10⁻⁹ M, 10⁻¹⁰ M, 10⁻¹¹ M, or 10⁻¹² M (a smaller K_{D} denotes a tighter binding). Methods for determining whether an antibody specifically binds to an antigen are known in the art and include, for example, equilibrium dialysis, surface plasmon resonance (e.g., BIACORE™), bio-layer interferometry assay (e.g., Octet® HTX biosensor), solution-affinity ELISA, and the like. In some embodiments, specific binding is measured in a surface plasmon resonance assay, e.g., at 25° C. or 37° C. An antibody or antigen-binding fragment that specifically binds an antigen from one species may or may not have cross-reactivity to other antigens, such as an orthologous antigen from another species.

[0196] The term “K_{D},” as used herein, refers to the equilibrium dissociation constant of a particular antibody-antigen interaction.

[0197] The term “surface plasmon resonance,” as used herein, refers to an optical phenomenon that allows for the analysis of real-time biomolecular interactions by detection of alterations in protein concentrations within a biosensor matrix, for example using the BIACORE™ system (Cytiva, Marlborough, MA).

[0198] The term “epitope,” as used herein, refers to an antigenic determinant that interacts with a specific antigen binding site in the variable region of an antibody molecule known as a paratope. A single antigen may have more than one epitope. Thus, different antibodies may bind to different areas on an antigen and may have different biological effects. The term “epitope” also refers to a site on an antigen to which B and/or T cells respond. It also refers to a region of an antigen that is bound by an antibody. Epitopes may be either linear or discontinuous (e.g., conformational). A linear epitope is one produced by adjacent amino acid residues in a polypeptide chain. A conformational epitope is produced by spatially juxtaposed amino acids from different segments of the linear polypeptide chain. In certain embodiments, epitopes may include determinants that are chemically active surface groupings of molecules such as amino acids, sugar side chains, phosphoryl groups, or sulfonyl groups, and, in certain embodiments, may have specific three-dimensional structural characteristics, and/or specific charge characteristics. Epitopes may also be defined as structural or functional. Functional epitopes are generally a subset of the structural epitopes and have those residues that directly contribute to the affinity of the interaction. An epitope typically includes at least 3, and more usually, e.g., at least 5 or at least 8-10 amino acids in a unique spatial conformation.

[0199] Methods for determining the epitope of an antigen-binding protein, e.g., an antibody or antigen-binding fragment, include alanine scanning mutational analysis, peptide blot analysis (Reineke, Methods Mol Biol 2004, 248:443-463), peptide cleavage analysis, crystallographic studies, and nuclear magnetic resonance (NMR) analysis. In addition, methods such as epitope exclusion, epitope extraction, and chemical modification of antigens can be employed (Tomer, Prot Sci 2000, 9:487-496). Another method that can be used to identify the amino acids within a polypeptide with which an antigen-binding protein (e.g., an antibody or antigen-binding fragment) interacts is hydrogen/deuterium exchange detected by mass spectrometry (HDX). See, e.g., Ehring, Analytical Biochemistry 1999, 267:252-259; Engen and Smith, Anal Chem 2001, 73:256A-265A.

[0200] The term “competes,” as used in reference to competing for binding, refers to an antigen-binding protein (e.g., antibody or antigen-binding fragment) that binds to an antigen and inhibits or blocks the binding of another antigen-binding protein (e.g., antibody or antigen-binding fragment) to the antigen. Unless otherwise stated, the term also includes competition between two antigen-binding proteins (e.g., antibodies) in both orientations, i.e., a first antigen that binds an antigen and blocks binding of the antigen by a second antibody, and vice versa. Thus, in some embodiments, competition occurs in one such orientation. In some embodiments, the first antigen-binding protein (e.g., antibody) and second antigen-binding protein (e.g., antibody) may bind to the same epitope. Alternatively, the first and second antigen-binding proteins (e.g., antibodies) may bind to different epitopes, which may be overlapping or non-overlapping, wherein binding of one antigen-binding protein inhibits or blocks the binding of the second antigen-binding protein, e.g., via steric hindrance. Competition between antigen-binding proteins may be measured by methods known in the art, e.g., by a real-time, label-free bio-layer interferometry assay.

[0201] In the context of the present disclosure, the term “neutralizing antibody” or “nAb” refers to an antibody that binds to a pathogen (e.g., a virus) and interferes with its ability to infect a cell. Non-limiting examples of neutralizing antibodies include antibodies that bind to a viral particle and inhibit successful transduction, e.g., one or more steps selected from binding, entry, trafficking to the nucleus, and transcription of the viral genome. Some neutralizing antibodies may block a virus at the post-entry step.

[0202] The term “immune response” refers to a response of a cell of the immune system (e.g., a B-cell, T-cell, macrophage or polymorphonucleocyte) to a stimulus such as an immunogen, e.g., antigen (e.g., a viral antigen). Active immune responses can involve differentiation and proliferation of immunocompetent cells, which leads to synthesis of antibodies or the development of cell-mediated reactivity, or both. An active immune response can be mounted by the host after exposure to an antigen (e.g., by infection or by vaccination). Active immune response can be contrasted with passive immunity, which can be acquired through the transfer of substances such as, e.g., an antibody, transfer factor, thymic graft, and/or cytokines from an actively immunized host to a non-immune host.

[0203] The term “T cell” is used herein in its broadest sense to refer to all types of immune cells expressing CD3, including T-helper cells (CD4+ cells), cytotoxic T-cells (CD8+ cells), T-regulatory cells (Treg), and natural killer (NK)-T cells.

[0204] The terms “substantial identity” and “substantially identical,” as used with reference to a nucleic acid or fragment thereof, indicates that, when optimally aligned with appropriate nucleotide insertions or deletions with another nucleic acid (or its complementary strand), there is nucleotide sequence identity in at least about 90%, e.g., at least 91%, 92%, 93%, 94%, 95%, 96%, 97%, 98% or 99%, of the nucleotide bases, as measured by any well-known algorithm of sequence identity, such as FASTA, BLAST or GAP, as discussed below. A nucleic acid molecule having substantial identity to a reference nucleic acid molecule may, in certain instances, encode a polypeptide having the same or substantially similar amino acid sequence as the polypeptide encoded by the reference nucleic acid molecule.

[0205] As applied to polypeptides, the terms “substantial identity” and ““substantially identical” mean that two peptide sequences, when optimally aligned, share at least about 90% sequence identity, e.g., at least 90%, 91%, 92%, 93%, 94%, 95%, 96%, 97%, 98% or 99% sequence identity. In some embodiments, residue positions that are not identical differ by conservative amino acid substitutions. A “conservative amino acid substitution” is one in which an amino acid residue is substituted by another amino acid residue having a side chain (R group) with similar chemical properties (e.g., charge or hydrophobicity). In general, a conservative amino acid substitution will not substantially change the functional properties of a protein.

[0206] Sequence similarity for polypeptides is typically measured using sequence analysis software. Protein analysis software matches similar sequences using measures of similarity assigned to various substitutions, deletions, and other modifications, including conservative amino acid substitutions. For instance, GCG software contains programs such as GAP and BESTFIT which can be used with default parameters to determine sequence homology or sequence identity between closely related polypeptides, such as homologous polypeptides from different species of organisms or between a wild-type protein and a mutein thereof. See, e.g., GCG Version 6.1. Polypeptide sequences also can be compared using FASTA with default or recommended parameters; a program in GCG Version 6.1. FASTA (e.g., FASTA2 and FASTA3) provides alignments and percent sequence identity of the regions of the best overlap between the query and search sequences (Pearson, 2000 supra). Another preferred algorithm when comparing a sequence of the disclosure to a database containing a large number of sequences from different organisms is the computer program BLAST, especially BLASTP or TBLASTN, using default parameters. See, e.g., Altschul et al., 1990, J. Mol. Biol. 215: 403-410 and 1997 Nucleic Acids Res. 25:3389-3402.

[0207] A “variant” of a polypeptide, such an immunoglobulin, VH, VL, heavy chain, light chain, or CDR comprising an amino acid sequence specifically set forth herein, refers to a polypeptide comprising an amino acid sequence that is at least about 70%-99.9% (e.g., at least 70, 75, 80, 85, 90, 91, 92, 93, 94, 95, 96, 97, 98, 99, 99.5, or 99.9%) identical to the reference polypeptide sequence (e.g., as set forth in the sequence listing below), when the comparison is performed by a BLAST algorithm wherein the parameters of the algorithm are selected to give the largest match between the respective sequences over the entire length of the respective reference sequences. In some embodiments, a variant of a polypeptide includes a polypeptide having the amino acid sequence of a reference polypeptide sequence (e.g., as set forth in the sequence listing below) but for one or more (e.g., 1 to 10, or less than 20, or less than 10) missense mutations (e.g., conservative substitutions), nonsense mutations, deletions, or insertions.

[0208] The term “effective” applied to dose or amount refers to that quantity of a compound or pharmaceutical composition that is sufficient to result in a desired activity upon administration to a subject in need thereof. Note that when a combination of active ingredients is administered, the effective amount of the combination may or may not include amounts of each ingredient that would have been effective if administered individually. The exact amount required will vary from subject to subject, depending on the species, age, and general condition of the subject, the severity of the condition being treated, the particular drug or drugs employed, the mode of administration, and the like.

[0209] The phrase “pharmaceutically acceptable,” as used in connection with compositions described herein, refers to molecular entities and other ingredients of such compositions that are physiologically tolerable and do not typically produce untoward reactions when administered to a mammal (e.g., a human). Preferably, the term “pharmaceutically acceptable” means approved by a regulatory agency of the Federal or a state government or listed in the U.S. Pharmacopeia or other generally recognized pharmacopeia for use in mammals, and more particularly in humans.

[0210] The terms “treat” or “treatment” of a state, disorder or condition include: (1) preventing, delaying, or reducing the incidence and/or likelihood of the appearance of at least one clinical or sub-clinical symptom of the state, disorder or condition developing in a subject that may be afflicted with or predisposed to the state, disorder or condition, but does not yet experience or display clinical or subclinical symptoms of the state, disorder or condition; (2) inhibiting the state, disorder or condition, i.e., arresting, reducing or delaying the development of the disease or a relapse thereof or at least one clinical or sub-clinical symptom thereof; or (3) relieving the disease, i.e., causing regression of the state, disorder or condition or at least one of its clinical or sub-clinical symptoms. The benefit to a subject to be treated is either statistically significant or at least perceptible to the patient or to the physician.

[0211] An “individual” or “subject” or “animal” refers to humans, veterinary animals (e.g., cats, dogs, cows, horses, sheep, pigs, etc.) and experimental animal models of diseases (e.g., mice, rats). In a preferred embodiment, the subject is a human.

[0212] Compositions or methods “comprising” or “including” one or more recited elements may include other elements not specifically recited. For example, a composition that “comprises” or “includes” a protein may contain the protein alone or in combination with other ingredients. The transitional phrase “consisting essentially of” means that the scope of a claim is to be interpreted to encompass the specified elements recited in the claim and those that do not materially affect the basic and novel characteristic(s) of the claimed invention. Thus, the term “consisting essentially of” when used in a claim of this invention is not intended to be interpreted to be equivalent to “comprising.”

[0213] “Optional” or “optionally” means that the subsequently described event or circumstance may or may not occur and that the description includes instances in which the event or circumstance occurs and instances in which the event or circumstance does not.

[0214] Designation of a range of values includes all integers within or defining the range, and all subranges defined by integers within the range. For example, 5-10 nucleotides is understood as 5, 6, 7, 8, 9, or 10 nucleotides, whereas 5-10% is understood to contain 5% and all possible values through 10%.

[0215] At least 17 nucleotides of a 20 nucleotide sequence is understood to include 17, 18, 19, or 20 nucleotides of the sequence provided, thereby providing an upper limit even if one is not specifically provided as it would be clearly understood. Similarly, up to 3 nucleotides would be understood to encompass 0, 1, 2, or 3 nucleotides, providing a lower limit even if one is not specifically provided. When “at least,” “up to,” or other similar language modifies a number, it can be understood to modify each number in the series.

[0216] As used herein, “no more than” or “less than” is understood as the value adjacent to the phrase and logical lower values or integers, as logical from context, to zero. For example, a duplex region of “no more than 2 nucleotide base pairs” has a 2, 1, or 0 nucleotide base pairs. When “no more than” or “less than” is present before a series of numbers or a range, it is understood that each of the numbers in the series or range is modified.

[0217] As used herein, it is understood that when the maximum amount of a value is represented by 100% (e.g., 100% inhibition) that the value is limited by the method of detection. For example, 100% inhibition is understood as inhibition to a level below the level of detection of the assay.

[0218] Unless otherwise apparent from the context, the term “about” encompasses values±5% of a stated value. In certain embodiments, the term “about” is understood to encompass tolerated variation or error within the art, e.g., 2 standard deviations from the mean, or the sensitivity of the method used to take a measurement, or a percent of a value as tolerated in the art, e.g., with age. When “about” is present before the first value of a series, it can be understood to modify each value in the series.

[0219] The term “and/or” refers to and encompasses any and all possible combinations of one or more of the associated listed items, as well as the lack of combinations when interpreted in the alternative (“or”).

[0220] The term “or” refers to any one member of a particular list and also includes any combination of members of that list.

[0221] The singular forms of the articles “a,” “an,” and “the” include plural references unless the context clearly dictates otherwise. For example, the term “a protein” or “at least one protein” can include a plurality of proteins, including mixtures thereof.

[0222] Statistically significant means p≤0.05.

[0223] In the event of a conflict between a sequence in the application and an indicated accession number or position in an accession number, the sequence in the application predominates.

### DETAILED DESCRIPTION

### I. Overview

[0224] Provided herein are methods of inserting a nucleic acid encoding a polypeptide of interest into a target genomic locus in a cell or a population of cells in a subject, methods of expressing a polypeptide of interest from a target genomic locus in a cell or a population of cells in a subject, methods of treating an enzyme deficiency (e.g., FIX deficiency or GAA deficiency) in a subject in need thereof, and methods of preventing or reducing the onset of a sign or symptom of an enzyme deficiency in a subject in need thereof.

[0225] Gene transfer technologies generally rely on one or more protein components for the encapsulation, transport, and/or transmission of genetic material. Frequently, these components contain antigenic or immunogenic regions that upon transfer into a living organism can be recognized by the host immune system, leading to immune responses that can impact the initial or long-term effectiveness of gene transfer.

[0226] For adeno-associated virus (AAV)-based vectors, which consist of a single-stranded DNA genome packaged in a protein capsid, presence of pre-existing antibodies against the capsid can lead to significantly reduced efficiency of transduction. These antibody responses develop following exposure to either wild type or recombinant AAVs, are usually neutralizing at relatively low titers, and can persist for at least a decade (>10 years), especially following exposure to the high doses required for existing AAV gene therapy products.

[0227] Thus, the development and persistence of high-titer neutralizing antibody responses following AAV exposure means that most systemic AAV-based gene therapies are expected to be a once per lifetime treatment, regardless of treatment outcome. This once-per-lifetime treatment paradigm poses several challenges in the clinic. Strategies to mitigate antibody responses to AAV therefore have the potential to greatly benefit patients due to both improved effectiveness and durability of treatment, as well as expanded access to existing and future AAV gene therapies.

[0228] Other broad-spectrum immunosuppression methodologies, including broad spectrum immunosuppression (e.g., calcineurin inhibitors [tacrolimus, cyclosporine], rapamycin, MMF, corticosteroids, methotrexate, proteasome inhibitors, costimulation blockade [CTLA4-Ig], Src kinase inhibitors, Btk inhibitors), B cell depletion (rituximab), IgG degrading enzymes (IdeS), IgG half-life reducers (FcRn blockers), or combinations thereof, have not been shown to be effective at enabling AAV vector re-administration at levels equivalent to naïve individuals.

[0229] In one aspect, the present disclosure provides a distinct B cell immunosuppression approach that enables AAV vector re-transduction at levels equal to seronegative animals, by depleting pre-existing nAbs (e.g., via combined plasma cell and immunoglobulin depletion). Long-lived plasma cells (LLPC) mediate constitutive antibody production to most antigens and are the likely reservoir of persistent anti-AAV antibody immunity. The present disclosure was made in part based on the discovery that pre-existing AAV nAbs could be directly eliminated in vivo by LLPC depletion with linvoseltamab, a fully-human T cell-bridging bispecific antibody targeting B cell maturation antigen and CD3 (anti-BCMA×CD3 bispecific antibody), either alone or in combination with B cell depletion (to eliminate potential non-LLPC sources of anti-AAV nAbs) and/or FcRn blockade (to accelerate serum IgG clearance).

[0230] The methods described herein use plasma cell depleting agents or combinations comprising plasma cell depleting agents to mitigate immune response and facilitate redosing of nucleic acid constructs encoding a polypeptide of interest and nuclease agents targeting a target genomic locus. Optionally, the plasma cell depleting agents (e.g., BCMA×CD3 antigen-binding molecules) are used in combination with other immunosuppression methodologies, such as immunoglobulin depleting agents (e.g., FcRn blockers or IgG degrading enzymes), B cell depleting agents, plasmapheresis, therapeutic plasma exchange, immunoadsorption, broad spectrum immunosuppression, or combinations thereof. In one example, plasma cell depleting agents (e.g., BCMA×CD3 bispecific antigen-binding molecules) are used in combination with immunoglobulin depleting agents (e.g., IgG half-life reducers, such as FcRn blockers). In another example, plasma cell depleting agents (e.g., BCMA×CD3 bispecific antigen-binding molecules) are used in combination with B cell depleting agents (e.g., CD20×CD3 antigen-binding molecules). In another example, BCMA×CD3 bispecific antigen-binding molecules are used in combination with immunoglobulin depleting agents (e.g., FcRn blockers) and B cell depleting agents (e.g., CD20×CD3 antigen-binding molecules). This allows re-dosing of any AAV gene therapy product. For example, for CRISPR-mediated gene insertion platforms consisting of an AAV and LNP, the AAV and/or LNP can be re-dosed multiple times when plasma cell depleting agents or combinations comprising plasma cell depleting agents is co-administered.

[0231] Using plasma cell depleting agents or combinations comprising plasma cell depleting agents to mitigate an anti-AAV antibody response can allow for repeated dosing of an identical gene insertion therapeutic cargo. This allows targeted cells in a subject to produce a polypeptide of interest in a step-wise, increasing fashion due to increased gene insertion in additional targeted cells following repeated dosing until a desired level of expression and/or activity of the polypeptide of interest is achieved in a subject without overshooting. This can be particularly advantageous in situations in which overshooting (i.e., achieving higher than desired levels of expression and/or activity of the polypeptide of interest) would result in undesired side effects (e.g., toxicity). Likewise, using plasma cell depleting agents or combinations comprising plasma cell depleting agents to mitigate an anti-AAV antibody response can allow for gene insertion of an AAV template into two separate genomic locations from two discrete dosings (e.g., two discrete dosings of AAV and LNP). Similarly, using plasma cell depleting agents or combinations comprising plasma cell depleting agents to mitigate an anti-AAV antibody response can allow for gene insertion of two different AAV templates (encoding different polypeptides of interest or the same polypeptide of interest) from two discrete dosings (e.g., two discrete dosings of AAV and LNP).

[0232] Also provided are compositions or combinations or kits comprising a plasma cell depleting agent or combination comprising a plasma cell depleting agent in combination with: (a) a nucleic acid construct comprising a coding sequence for the polypeptide of interest; and (b) a nuclease agent or one or more nucleic acids encoding the nuclease agent, wherein the nuclease agent targets a nuclease target site in a target genomic locus. As used herein, the term “in combination with” a plasma cell depleting agent means that additional component(s) may be administered prior to, concurrent with, or after the administration of the plasma cell depleting agent. The different components of the combination can be formulated into a single composition, e.g., for simultaneous delivery, or formulated separately into two or more compositions (e.g., a kit including each component, for example, wherein the further agent is in a separate formulation).

[0233] In another aspect, the present disclosure provides use of B cell depleting agents such as anti-CD20×CD3 bispecific antibodies or functional fragments thereof to mitigate immune response and facilitate redosing of nucleic acid constructs encoding a polypeptide of interest and nuclease agents targeting a target genomic locus. The B cell depleting agents (e.g., anti-CD20×CD3 bispecific antibodies or functional fragments thereof) are able to suppress host B cell responses to new antigens. In AAV gene therapies, seronegative/naive patients are dosed with AAV and develop antibody responses to the AAV capsid antigen. This antibody response prevents future re-dosing of AAV because the antibodies are neutralizing, and the antibody response is sustained for 10+ years. When AAV is co-administered with B cell depleting agents (e.g., anti-CD20×CD3 bispecific antibodies or functional fragments thereof), the B cell response is suppressed and anti-AAV IgM and IgG responses are significantly suppressed. This allows re-dosing of any AAV gene therapy product. For example, for CRISPR-mediated gene insertion platforms consisting of an AAV and LNP, the AAV and/or LNP can be re-dosed multiple times when B cell depleting agents (e.g., anti-CD20×CD3 bispecific antibodies or functional fragments thereof) are co-administered. The B cell depleting agents (e.g., anti-CD20×CD3 bispecific antibodies or functional fragments thereof) prevent antibody formation against the AAV. The B cell depleting agents (e.g., anti-CD20×CD3 bispecific antibodies or functional fragments thereof) can also prevent antibody formation against certain LNP components (e.g., anti-PEG IgG) or Cas proteins, which can improve efficacy of LNP redosing. In such contexts in which the patient is seronegative/naïve with respect AAV immunity or another immunogen to be administered, the B cell depleting agents (e.g., anti-CD20×CD3 bispecific antibodies or functional fragments thereof) can be used in methods in which a plasma cell depleting agent is not administered. Likewise, in such contexts in which the patient is seronegative/naïve with respect AAV immunity or another immunogen to be administered, the B cell depleting agents (e.g., anti-CD20×CD3 bispecific antibodies or functional fragments thereof) can be used in methods in which an immunoglobulin depleting agent is not administered.

[0234] Using B cell depleting agents (e.g., anti-CD20×CD3 bispecific antibodies or functional fragments thereof) to mitigate an anti-AAV antibody response can allow for repeated dosing of an identical gene insertion therapeutic cargo. This allows targeted cells in a subject to produce a polypeptide of interest in a step-wise, increasing fashion due to increased gene insertion in additional targeted cells following repeated dosing until a desired level of expression and/or activity of the polypeptide of interest is achieved in a subject without overshooting. This can be particularly advantageous in situations in which overshooting (i.e., achieving higher than desired levels of expression and/or activity of the polypeptide of interest) would result in undesired side effects (e.g., toxicity). Likewise, using B cell depleting agents (e.g., anti-CD20×CD3 bispecific antibodies or functional fragments thereof) to mitigate an anti-AAV antibody response can allow for gene insertion of an AAV template into two separate genomic locations from two discrete dosings (e.g., two discrete dosings of AAV and LNP). Similarly, using B cell depleting agents (e.g., anti-CD20×CD3 bispecific antibodies or functional fragments thereof) to mitigate an anti-AAV antibody response can allow for gene insertion of two different AAV templates (encoding different polypeptides of interest or the same polypeptide of interest) from two discrete dosings (e.g., two discrete dosings of AAV and LNP).

[0235] Other broad-spectrum immunosuppression methodologies have not been shown to be effective at enabling AAV vector re-administration at levels equivalent to naïve individuals. The B cell depleting agents (e.g., anti-CD20×CD3 bispecific antibodies or functional fragments thereof) disclosed herein, can achieve levels of re-transduction similar to naïve animals.

[0236] Also provided are compositions or combinations or kits comprising a B cell depleting agent (e.g., anti-CD20×CD3 bispecific antibody or functional fragment thereof) in combination with: (a) a nucleic acid construct comprising a coding sequence for the polypeptide of interest; and (b) a nuclease agent or one or more nucleic acids encoding the nuclease agent, wherein the nuclease agent targets a nuclease target site in a target genomic locus. As used herein, the term “in combination with” a B cell depleting agent (e.g., anti-CD20×CD3 bispecific antibody or functional fragment thereof) means that additional component(s) may be administered prior to, concurrent with, or after the administration of the B cell depleting agent (e.g., anti-CD20×CD3 bispecific antibody or functional fragment thereof). The different components of the combination can be formulated into a single composition, e.g., for simultaneous delivery, or formulated separately into two or more compositions (e.g., a kit including each component, for example, wherein the further agent is in a separate formulation).

### II. Plasma Cell Depleting Agents

[0237] In some embodiments, the compositions disclosed herein comprise or the methods disclosed herein include administering a therapeutically effective amount of a plasma cell depleting agent to a subject in need thereof. As used herein, a “plasma cell depleting agent” refers to any molecule capable of specifically binding to a surface antigen on plasma cells and killing or depleting the plasma cells.

[0238] The plasma cell depleting agents can be administered to a subject in need thereof either alone, or in combination with, a B cell depleting agent and/or an immunoglobulin depleting agent. In various aspects, a plasma cell depleting agent may be combined or administered in combination with a B cell depleting agent, an immunoglobulin depleting agent, plasmapheresis, therapeutic plasma exchange, immunoadsorption, and/or an immunogen (e.g., nucleic acid construct, nuclease agent or CRISPR/Cas system, e.g., in an immunogenic delivery vehicle such as, e.g., AAV) disclosed herein. Suitable combinations comprising a plasma cell depleting agent are described in more detail elsewhere herein. In some embodiments, the plasma cell depleting agent of the present disclosure is capable of depleting plasma cells including, without limitation, long-lived plasma cells (LLPCs). In some embodiments, a plasma cell depleting agent is administered to a subject having a pre-existing immunity against an immunogen (e.g., an immunogenic delivery vehicle such as, e.g., AAV (e.g., AAV comprising a nucleic acid construct described herein)). In some embodiments, a plasma cell depleting agent is administered to a subject having a pre-existing immunity against a nucleic acid construct described herein, a polypeptide of interest encoded by a nucleic acid construct described herein, a nuclease agent or one or more nucleic acids encoding the nuclease agent as described herein, or a delivery vehicle for the nucleic acid construct, the nuclease agent, or the one or more nucleic acids encoding the nuclease agent as described herein. In some embodiments, a plasma cell depleting agent is administered to a subject having a pre-existing immunity against an AAV vector comprising a nucleic acid construct described herein.

[0239] As used herein, the term “immunogen” refers to any molecule that is capable of eliciting an immune response. Non-limiting examples of immunogens include immunogenic delivery vehicles such as viral vectors also termed herein “viral particles” (e.g., viral vectors derived from adeno-associated viruses (AAV), adenoviruses, retroviruses [e.g., lentiviruses], or oncolytic viruses [e.g., an adenovirus, a rhabdovirus, a herpes virus, a measles virus, a coxsackievirus, a poliovirus, a reovirus, a poxvirus, a parvovirus, Maraba virus, or Newcastle disease virus]) or portions thereof (e.g., capsid proteins), virus-like particles (VLPs), non-viral vectors (e.g., bacteriophages [such as lambda (X) bacteriophage, EMBL bacteriophage; bacterial vectors such as pBs, phagescript, PsiX174, pBluescript SK, pBs KS, pNH8a, pNH16a, pNH18a, pNH46a; pTrc99A, pKK223-3, pKK233-3, pDR540, and pRIT5]; eukaryotic vectors [such as pWLneo, pSV2cat, pOG44, PXR1, pSG, pSVK3, pBPV, pMSG and pSVL]; transposons [such as Sleeping Beauty transposon and PiggyBac transposon]; bacterial vectors, fungal vectors, and protozoal vectors), liposomes, lipid nanoparticles (LNPs), non-lipid nanoparticles, mammalian cells (e.g., allogeneic cells), and other carriers. Non-limiting examples of immunogens also include polypeptide molecules (e.g., proteins [e.g., therapeutic proteins or antibodies or fragments thereof], peptides), polynucleotide molecules (e.g., mRNAs, interfering nucleic acid molecules [RNAi, siRNA, shRNA], miRNAs, antisense oligonucleotides, ribozymes, aptamers, mixmers, or multimers), antigen-binding molecules fused to a payload, as well as naturally occurring or modified bacteria, fungi, protozoa, parasites, helminths, ectoparasites, or other microorganisms (including bacteria, fungi and other microorganisms found in microbiota). In some embodiments, the immunogen is an immunogenic delivery vehicle, a polypeptide, or a polynucleotide. In some embodiments, the immunogen is an immunogenic delivery vehicle (e.g., AAV) or a polypeptide or polynucleotide encoded by a nucleic acid construct or transgene within the immunogenic delivery vehicle. In some embodiments, the immunogen is an immunogenic delivery vehicle. In some embodiments, the immunogenic delivery vehicle is a viral vector. In some embodiments, the immunogenic delivery vehicle is a viral vector, a virus-like particle (VLP), a lipid nanoparticle (LNP), a non-lipid nanoparticle, a liposome, a bacterial vector, a fungal vector, a protozoal vector, or a mammalian cell. In some embodiments, the immunogenic delivery vehicle is a viral vector, a virus-like particle (VLP), a lipid nanoparticle (LNP), a non-lipid nanoparticle, a liposome, a bacterial vector, a fungal vector, or a protozoal vector. Glycans and lipids are further encompassed by the term immunogen as used herein. In some embodiments, an immunogen can be a nucleic acid construct described herein, a polypeptide of interest encoded by a nucleic acid construct described herein, a nuclease agent or one or more nucleic acids encoding the nuclease agent as described herein, or a delivery vehicle for the nucleic acid construct, the nuclease agent, or the one or more nucleic acids encoding the nuclease agent as described herein.

[0240] In some embodiments, the plasma cell depleting agent can be an antibody, a small molecule compound, a nucleic acid, a polypeptide, or a functional fragment or variant thereof. Non-limiting examples of suitable plasma cell depleting agents include B cell maturation antigen (BCMA) targeting agents (described elsewhere herein), proteasome inhibitors [e.g., bortezomib (Velcade), carfilzomib (Kyprolis), ixazomib (Niniaro)], histone deacetylase inhibitors [e.g., panobinostat (Farydak)], B-cell activating factor (BAFF; also referred to as BLyS, TALL-1, or CD257) inhibitors (e.g., anti-BAFF antibodies such as belimumab, tabalumab, AMG570; or anti-BAFF receptor antibodies such as ianalumab), proliferation-inducing ligand (APRIL; also referred to as TNFSF13 or CD256) inhibitors (e.g., anti-APRIL antibodies such as BION-1301 or VIS624), G protein-coupled receptor, class C, group 5, member D (GPRC5D) inhibitors (e.g., anti-GPRC5D antibodies, anti-GPRC5D×CD3 bispecific antibodies such as talquetamab), Fc receptor homolog 5 (FcRH5; also referred to as FcRL5, IRTA2, or CD307) inhibitors (e.g., anti-FcRH5 antibodies, anti-FcRH5 xCD3 bispecific antibodies such as Cevostamab), and cluster of differentiation 38 (CD38; also referred to as CADPR 1 or ADPRC1) inhibitors (e.g., anti-CD38 antibodies).

[0241] In some embodiments, the plasma cell depleting agents used in the compositions and methods disclosed herein are BCMA targeting agents. As used herein, the term “BCMA targeting agent” refers to any molecule capable of binding specifically to BCMA that is expressed on the surface of a cell, e.g., a cell in a subject, thus targeting the cell for destruction. BCMA is expressed exclusively in B-cell lineage cells, particularly in the interfollicular region of the germinal center as well as on plasmablasts and differentiated plasma cells. BCMA is selectively induced during plasma cell differentiation and is required for optimal survival of long-lived plasma cells (LLPCs) in the bone marrow. Thus, a BCMA targeting agent binds to BCMA expressed on a plasma cell surface and mediates killing or depletion of cells that express BCMA (plasma cell depletion). In some embodiments, a BCMA targeting agent comprises a binding moiety that binds to plasma cell-surface-expressed BCMA (an antigen-binding moiety or antigen-binding fragment thereof) and a moiety that facilitates killing of said plasma cell. In some embodiments, the plasma cell-surface-expressed BCMA-binding moiety is an antibody or antigen-binding fragment thereof that binds specifically to BCMA. Such a BCMA-binding moiety can be linked (e.g., covalently bound) to a moiety that facilitates killing or destruction of the targeted plasma cell. The moiety that facilitates targeted killing of the bound plasma cell may be a molecule that directly kills the targeted cell (e.g., a cytotoxic agent) or may be a protein or fragment thereof that mediates killing of the targeted cell, e.g., by an immune cell, e.g., a T-cell. In the context of the present disclosure, the term “BCMA targeting agent” includes, but is not limited to, anti-BCMA antibodies that are conjugated to a therapeutic agent such as a cytotoxic drug (“BCMA ADC” or “anti-BCMA ADC,” e.g., Belantamab Mafodotin/GSK2857916, MEDI2228, HDP-101), chimeric antigenic receptors (CARs) that bind specifically to BCMA, (“BCMA CAR” or “anti-BCMA CAR”) and anti-BCMA×CD3 bispecific antibodies (e.g., linvoseltamab (REGN5458), REGN5459, pacanalotamab (AMG420), teclistamab (JNJ-64007957), AMG701, alnuctamab (CC-93269), EM801, EM901, elranatamab (PF-06863135), TNB383B (ABBV-383), and TNB384B).

[0242] In some embodiments, the BCMA targeting agent used in the context of the disclosed methods is an antibody-drug conjugate (ADC) comprising an anti-BCMA antibody and a cytotoxic drug. In some embodiments, the anti-BCMA antibody or antigen-binding fragment thereof and the cytotoxic agent are covalently attached via a linker. In general terms, the ADCs comprise: A-[L-P]_{y}, in which A is an antigen-binding molecule, e.g., an anti-BCMA antibody, or a fragment thereof, L is a linker, P is the payload or therapeutic moiety (e.g., cytotoxic agent), and y is an integer from 1 to 30. Examples of suitable cytotoxic agents and chemotherapeutic agents for forming ADCs are known in the art. Non-limiting examples of suitable cytotoxic agents that can be conjugated to anti-BCMA antibodies for use in the disclosed methods are auristatin such as monomethyl auristatin E (MMAE) or monomethyl auristatin F (MMAF), a tubulysin such as TUB-OH or TUB-OMOM, a tomaymycin derivative, a dolastatin derivative, or a maytansinoid such as DM1 or DM4. In some exemplary embodiments, an anti-BCMA ADC used in the present methods comprises the HCVR, LCVR and/or CDR amino acid sequences of any of the anti-BCMA antigen-binding molecules disclosed herein.

[0243] Other anti-BCMA ADCs that can be used in the context of the methods of the present disclosure include, e.g., the ADCs referred to and known in the art as Belantamab Mafodotin (GSK2857916), AMG224, HDP-101, MED12228, and TBL-CLN1, or any of the anti-BCMA ADCs set forth, e.g., in International Patent Publications WO2011/108008, WO2014/089335, WO2017/093942, WO2017/143069, or WO2019/025983. The portions of the publications cited herein that identify anti-BCMA ADCs are hereby incorporated by reference.

[0244] In some embodiments, the BCMA targeting agent used in the context of the disclosed methods is a chimeric antigen receptor (CAR) that binds specifically to BCMA (“BCMA CAR”). Generally, a “chimeric antigen receptor” (CAR) exhibits a specific anti-target cellular immune activity and comprises a binding domain against a component present on the target cell, for example an antibody-based specificity for a desired antigen (e.g., BCMA on plasma cell), and a T cell receptor-activating intracellular domain. CARs typically comprise an extracellular single chain antibody-binding domain (scFv) fused to the intracellular signaling domain of the T cell antigen receptor complex zeta chain, and have the ability, when expressed in T cells, to redirect antigen recognition based on the monoclonal antibody's specificity. In certain embodiments, the BCMA CAR or antigen-binding fragment thereof comprises a HCVR, LCVR, and/or CDRs comprising the amino acid sequences of any of the antibodies set forth in US Patent Publication No. US 2020/0023010, which is hereby incorporated by reference in its entirety. In some exemplary embodiments, an anti-BCMA CAR used in the present methods comprises the HCVR, LCVR and/or CDR amino acid sequences of any of the anti-BCMA antigen-binding molecules disclosed herein.

[0245] Other anti-BCMA CARs that can be used in the context of the methods of the present disclosure include, e.g., the CARs referred to and known in the art as bb2121, LCAR-B38M, and 4C8A, or any of the anti-BCMA CARs set forth, e.g., in WO 2015/052538, WO 2015/052536, WO 2016/094304, WO 2016/166630, WO 2016/151315, WO 2016/130598, WO 2017/183418, WO 2017/173256, WO 2017211900, WO 2017/130223, WO 2018/229492, WO 2018/085690, WO 2018/151836, WO 2018/028647, WO 2019/006072. The portions of the publications cited herein that identify anti-BCMA CARs are hereby incorporated by reference.

[0246] In some exemplary embodiments, the BCMA targeting agent used in the disclosed methods is a multispecific (e.g., bispecific) antibody, or a functional fragment thereof, that specifically binds B cell maturation antigen (BCMA) and CD3 (e.g., an anti-BCMA×CD3 bispecific antibody). The anti-BCMA×CD3 multispecific (e.g., bispecific) antibodies are useful for specific targeting and T-cell-mediated killing of cells that express BCMA. The terms “antibody,” “antigen-binding fragment,” “human antibody,” “recombinant antibody,” and other related terminology are defined above. In the context of anti-BCMA×CD3 antibodies and antigen-binding fragments thereof, the present disclosure includes the use of bispecific antibodies wherein one arm of an immunoglobulin is specific for BCMA or a fragment thereof, and the other arm of the immunoglobulin is specific for a second therapeutic target (e.g., CD3 on T-cells). Exemplary bispecific formats that can be used in the context of the present disclosure include, without limitation, e.g., scFv-based or diabody bispecific formats, IgG-scFv fusions, dual variable domain (DVD)-Ig, Quadroma, knobs-into-holes, common light chain (e.g., common light chain with knobs-into-holes, etc.), CrossMab, CrossFab, (SEED) body, leucine zipper, Duobody, IgG1/IgG2, dual acting Fab (DAF)-IgG, and Mabe bispecific formats (see, e.g., Klein et al. 2012, mAbs 4(6):653-663, and references cited therein, for a review of the foregoing formats). Bispecific antibodies can also be constructed using peptide/nucleic acid conjugation, e.g., wherein unnatural amino acids with orthogonal chemical reactivity are used to generate site-specific antibody-oligonucleotide conjugates which then self-assemble into multimeric complexes with defined composition, valency and geometry. See, e.g., Kazane et al., J. Am. Chem. Soc., 2013, 135(1):340-46.

[0247] An anti-BCMA×CD3 bispecific antibody, or functional fragment thereof, may comprise any of various anti-BCMA×CD3 bispecific antibodies, or functional fragments thereof, disclosed herein, or any other such anti-BCMA×CD3 bispecific antibodies, or functional fragments thereof, known to persons of ordinary skill in the art (e.g., linvoseltamab (REGN5458), REGN5459, pacanalotamab (AMG420), teclistamab (JNJ-64007957), AMG701, alnuctamab (CC-93269), EM801, EM901, elranatamab (PF-06863135), TNB383B (ABBV-383), and TNB384B). In a specific embodiment, the anti-BCMA×CD3 bispecific antibody is REGN5458. In another specific embodiment, the anti-BCMA×CD3 bispecific antibody is REGN5459.

### A. BCMA×CD3 Antigen-Binding Molecules

[0248] In some embodiments, the present disclosure provides antigen-binding molecules including multispecific (e.g., bispecific) antibodies that specifically bind B cell maturation antigen (BCMA) and CD3 (e.g., an anti-BCMA×CD3 bispecific antibody). In some embodiments, the antigen-binding molecule is a multispecific (e.g., bispecific) antibody. Multispecific antibodies may be specific for different epitopes of one target polypeptide or may contain antigen-binding domains specific for more than one target polypeptide. See, e.g., Tutt et al., 1991, J. Immunol. 147:60-69; Kufer et al., 2004, Trends Biotechnol. 22:238-244. In some embodiments, the multispecific antibodies of the present disclosure can be linked to or co-expressed with another functional molecule, e.g., another peptide or protein. For example, an antibody or fragment thereof can be functionally linked (e.g., by chemical coupling, genetic fusion, noncovalent association or otherwise) to one or more other molecular entities, such as another antibody or antibody fragment to produce a bispecific or a multispecific antibody with a second binding specificity. In some embodiments, the multispecific antibody contains an antigen-binding domain that is specific for BCMA and an antigen-binding domain that is specific for CD3.

[0249] The term “CD3,” as used herein, refers to an antigen which is expressed on T cells as part of the multimolecular T cell receptor (TCR) and which consists of a homodimer or heterodimer formed from the dimeric association of two of four receptor chains: CD3-epsilon, CD3-delta, CD3-zeta, and CD3-gamma (e.g., gamma/epsilon, delta/epsilon, and zeta/zeta). CD3 is required for T cell activation.

[0250] As used herein, “an antibody that binds CD3” or an “anti-CD3 antibody” includes antibodies and antigen-binding fragments thereof that specifically recognize a single CD3 subunit (e.g., epsilon, delta, gamma or zeta), as well as antibodies and antigen-binding fragments thereof that specifically recognize a dimeric complex of two CD3 subunits (e.g., gamma/epsilon, delta/epsilon, and zeta/zeta CD3 dimers). Antibodies against CD3 have been shown to cluster CD3 on T cells, thereby causing T cell activation in a manner similar to the engagement of the TCR by peptide-loaded major histocompatibility complex (MHC) molecules. Thus, bispecific antigen-binding molecules that are capable of binding both CD3 and another antigen (e.g., CD20 or BCMA) would be useful in settings in which specific targeting and T cell-mediated killing of cells that express the non-CD3 antigen (e.g., CD20 or BCMA) is desired.

[0251] The antibodies and antigen-binding fragments of the present invention may bind soluble CD3 and/or cell surface-expressed CD3. Soluble CD3 includes natural CD3 proteins as well as recombinant CD3 protein variants such as, e.g., monomeric and dimeric CD3 constructs, that lack a transmembrane domain or are otherwise unassociated with a cell membrane.

[0252] As used herein, the expression “cell surface-expressed CD3” means one or more CD3 protein(s) that is/are expressed on the surface of a cell in vitro or in vivo, such that at least a portion of a CD3 protein is exposed to the extracellular side of the cell membrane and is accessible to an antigen-binding portion of an antibody. “Cell surface-expressed CD3” includes CD3 proteins contained within the context of a functional T cell receptor in the membrane of a cell. The expression “cell surface-expressed CD3” includes CD3 protein expressed as part of a homodimer or heterodimer on the surface of a cell (e.g., gamma/epsilon, delta/epsilon, and zeta/zeta CD3 dimers). The expression “cell surface-expressed CD3” also includes a CD3 chain (e.g., CD3-epsilon, CD3-delta or CD3-gamma) that is expressed by itself, without other CD3 chain types, on the surface of a cell. A “cell surface-expressed CD3” can comprise or consist of a CD3 protein expressed on the surface of a cell which normally expresses CD3 protein. Alternatively, “cell surface-expressed CD3” can comprise or consist of CD3 protein expressed on the surface of a cell that normally does not express human CD3 on its surface but has been artificially engineered to express CD3 on its surface.

[0253] As used herein, the expression “anti-CD3 antibody” includes both monovalent antibodies with a single specificity, as well as bispecific antibodies comprising one arm that binds CD3 and another arm that binds a different antigen, wherein the anti-CD3 arm comprises any of the HCVR/LCVR or CDR sequences, or functional fragments thereof, as set forth in Table 1 or Table 2 herein. Examples of anti-CD3 bispecific antibodies are described elsewhere herein. Exemplary anti-CD3 antibodies are also described in PCT International Application No. PCT/US2013/060511, which is herein incorporated by reference in its entirety.

[0254] The present disclosure includes bispecific antibodies and functional fragments thereof that bind human CD3 with high affinity. The present disclosure also includes bispecific antibodies and functional fragments thereof that bind human CD3 with medium or low affinity, depending on the therapeutic context and particular targeting properties that are desired. For example, in the context of a bispecific antigen-binding molecule, wherein one arm binds CD3 and a second arm binds another antigen (e.g., CD20 or BCMA), it may be desirable for the second arm to bind the non-CD3 (e.g., CD20 or BCMA) antigen with high affinity while the anti-CD3 arm binds CD3 with only moderate or low affinity. In this manner, preferential targeting of the antigen-binding molecule to cells expressing the non-CD3 (e.g., CD20 or BCMA) antigen may be achieved while avoiding general/untargeted CD3 binding and the consequent adverse side effects associated therewith.

[0255] In certain embodiments, the anti-CD3 antibodies induce T cell proliferation with an EC₅₀ value of less than about 0.33 pM, as measured by an in vitro T cell proliferation assay (e.g., assessing the proliferation of Jurkat cells or PBMCs in the presence of anti-CD3 antibodies). In certain embodiments, the anti-CD3 antibodies induce T cell proliferation (e.g., Jurkat cell proliferation and/or PBMC proliferation) with an EC₅₀ value of less than about 0.32 pM, less than about 0.31 pM, less than about 0.30 pM, less than about 0.28 pM, less than about 0.26 pM, less than about 0.24 pM, less than about 0.22 pM, or less than about 0.20 pM, as measured by an in vitro T cell proliferation assay.

[0256] In some embodiments, the anti-BCMA×CD3 bispecific antigen-binding molecule comprises a first antigen-binding domain (D1) that binds an epitope of BCMA (e.g., human BCMA), and a second antigen-binding domain (D2) that binds an epitope of CD3 (e.g., human CD3).

[0257] In some exemplary embodiments, the anti-BCMA×CD3 bispecific antibody, or antigen-binding fragment thereof, comprises a heavy chain variable region (HCVR), light chain variable region (LCVR), and/or complementarity determining regions (CDRs) comprising the amino acid sequences of any of the anti-BCMA×CD3 antibodies set forth in U.S. Pat. No. 11,384,153 and US 2020/0345843, which are hereby incorporated by reference in their entireties.

[0258] In some exemplary embodiments, an anti-BCMA×CD3 bispecific antibody or antigen-binding fragment thereof that can be used in the context of the present disclosure comprising a HCVR, a LCVR, and/or CDRs comprising the amino acid sequences of REGN5458 or REGN5459 as set forth in Table 1 below.

TABLE 1
Amino Acid Sequences of Exemplary Anti-BCMAxCD3 Bispecific
Antibodies.

| | Anti-BCMA | | | | Anti-CD3 | | | | Common | | | |
|---|---|---|---|---|---|---|---|---|---|---|---|---|
| Bispecific | First Antigen-Binding | | | | Second Antigen-Binding | | | | Light Chain Variable | | | |
| antibody | Domain | | | | Domain | | | | Region | | | |
| identifier | HCVR | HCDR1 | HCDR2 | HCDR3 | HCVR | HCDR1 | HCDR2 | HCDR3 | LCVR | LCDR1 | LCDR2 | LCDR3 |
| REGN5458 | 2 | 4 | 6 | 8 | 26 | 28 | 30 | 32 | 18 | 20 | 22 | 24 |
| REGN5459 | 2 | 4 | 6 | 8 | 34 | 36 | 38 | 40 | 18 | 20 | 22 | 24 |

Anti-BCMA HCVR DNA Sequence
SEQ ID NO: 1
GAGGTGCAGCTGGTGGAGTCTGGGGGAGGCTTGGTCCAGCCTGGGGGGTCCCTGAGACTCTCCTGTGCAGCCTCTGG
ATTCACCTTTAGTAACTTTTGGATGACCTGGGTCCGCCAGGCTCCAGGGAAGGGGCTGGAGTGGGTGGCCAACATGA
ACCAAGATGGAAGTGAGAAATACTATGTGGACTCTGTGAAGGGCCGATTCACCATCTCCAGAGACAACGCCAAGAGC
TCACTGTATCTGCAAATGAACAGCCTGAGAGCCGAGGACACGGCTGTGTATTACTGTGCGAGAGATCGGGAATATTG
TATTAGTACCAGCTGCTATGATGACTTTGACTACTGGGGCCAGGGAACCCTGGTCACCGTCTCCTCA
Anti-BCMA HCVR Protein Sequence
SEQ ID NO: 2
EVQLVESGGGLVQPGGSLRLSCAASGFTFSNFWMTWVRQAPGKGLEWVANMNQDGSEKYYVDSVKGRFTISRDNAKS
SLYLQMNSLRAEDTAVYYCARDREYCISTSCYDDFDYWGQGTLVTVSS
Anti-BCMA HCDR1 DNA Sequence
SEQ ID NO: 3
GGATTCACCTTTAGTAACTTTTGG
Anti-BCMA HCDR1 Protein Sequence
SEQ ID NO: 4
GFTFSNFW
Anti-BCMA HCDR2 DNA Sequence
SEQ ID NO: 5
ATGAACCAAGATGGAAGTGAGAAA
Anti-BCMA HCDR2 Protein Sequence
SEQ ID NO: 6
MNQDGSEK
Anti-BCMA HCDR3 DNA Sequence
SEQ ID NO: 7
GCGAGAGATCGGGAATATTGTATTAGTACCAGCTGCTATGATGACTTTGACTAC
Anti-BCMA HCDR3 Protein Sequence
SEQ ID NO: 8
ARDREYCISTSCYDDFDY
Anti-BCMA LCVR DNA Sequence
SEQ ID NO: 9
GACATCCAGATGACCCAGTCTCCATCCTCCCTGTCTGCATCTGTAGGAGACAGAGTCACCATCACTTGCCGGGCAAG
TCAGAGCATTAGCAGCTATTTAAATTGGTATCAGCAGAAACCAGGGAAAGCCCCTAAGCTCCTGATCTATGCTGCAT
CCAGTTTGCATAGTGGGGTCCCATCAAGGTTCAGTGGCAGTGGATCTGGGACAGATTTCACTCTCACCATCAGCAGT
CTGCAACCTGAAGATTTTGCAACTTACTACTGTCAACAGAGTTACAGTACCCCTCCGATCACCTTCGGCCAAGGGAC
ACGACTGGAGATTAAA
Anti-BCMA LCVR Protein Sequence
SEQ ID NO: 10
DIQMTQSPSSLSASVGDRVTITCRASQSISSYLNWYQQKPGKAPKLLIYAASSLHSGVPSRFSGSGSGTDFTLTISS
LQPEDFATYYCQQSYSTPPITFGQGTRLEIK
Anti-BCMA LCDR1 DNA Sequence
SEQ ID NO: 11
CAGAGCATTAGCAGCTAT
Anti-BCMA LCDR1 Protein Sequence
SEQ ID NO: 12
QSISSY
Anti-BCMA LCDR2 DNA Sequence
SEQ ID NO: 13
GCTGCATCC
Anti-BCMA LCDR2 Protein Sequence
SEQ ID NO: 14
AAS
Anti-BCMA LCDR3 DNA Sequence
SEQ ID NO: 15
CAACAGAGTTACAGTACCCCTCCGATCACC
Anti-BCMA LCDR3 Protein Sequence
SEQ ID NO: 16
QQSYSTPPIT
Common LCVR DNA Sequence
SEQ ID NO: 17
GACATCCAGATGACCCAGTCTCCATCCTCCCTGTCTGCATCTGTAGGAGACAGAGTCACCATCACTTGCCGGGCAAG
TCAGAGCATTAGCAGCTATTTAAATTGGTATCAGCAGAAACCAGGGAAAGCCCCTAAGCTCCTGATCTATGCTGCAT
CCAGTTTGCAAAGTGGGGTCCCGTCAAGGTTCAGTGGCAGTGGATCTGGGACAGATTTCACTCTCACCATCAGCAGT
CTGCAACCTGAAGATTTTGCAACTTACTACTGTCAACAGAGTTACAGTACCCCTCCGATCACCTTCGGCCAAGGGAC
ACGACTGGAGATTAAA
Common LCVR Protein Sequence
SEQ ID NO: 18
DIQMTQSPSSLSASVGDRVTITCRASQSISSYLNWYQQKPGKAPKLLIYAASSLQSGVPSRFSGSGSGTDFTLTISS
LQPEDFATYYCQQSYSTPPITFGQGTRLEIK
Common LCDR1 DNA Sequence
SEQ ID NO: 19
CAGAGCATTAGCAGCTAT
Common LCDR1 Protein Sequence
SEQ ID NO: 20
QSISSY
Common LCDR2 DNA Sequence
SEQ ID NO: 21
GCTGCATCC
Common LCDR2 Protein sequence
SEQ ID NO: 22
AAS
Common LCDR3 DNA sequence
SEQ ID NO: 23
CAACAGAGTTACAGTACCCCTCCGATCACC
Common LCDR3 Protein Sequence
SEQ ID NO: 24
QQSYSTPPIT
Anti-CD3 HCVR DNA Sequence-REGN5458
SEQ ID NO: 25
GAAGTACAGCTTGTAGAATCCGGCGGAGGACTGGTACAACCTGGAAGAAGTCTTAGACTGAGTTGCGCAGCTAGTGG
GTTTACATTCGACGATTACAGCATGCATTGGGTGAGGCAAGCTCCTGGTAAAGGATTGGAATGGGTTAGCGGGATAT
CATGGAACTCAGGAAGCAAGGGATACGCCGACAGCGTGAAAGGCCGATTTACAATATCTAGGGACAACGCAAAAAAC
TCTCTCTACCTTCAAATGAACTCTCTTAGGGCAGAAGACACAGCATTGTATTATTGCGCAAAATACGGCAGTGGTTA
TGGCAAGTTTTATCATTATGGACTGGACGTGTGGGGACAAGGGACAACAGTGACAGTGAGTAGC
Anti-CD3 HCVR Protein Sequence-REGN5458
SEQ ID NO: 26
EVQLVESGGGLVQPGRSLRLSCAASGFTFDDYSMHWVRQAPGKGLEWVSGISWNSGSKGYADSVKGRFTISRDNAKN
SLYLQMNSLRAEDTALYYCAKYGSGYGKFYHYGLDVWGQGTTVTVSS
Anti-CD3 HCDR1 DNA Sequence-REGN5458
SEQ ID NO: 27
GGGTTTACATTCGACGATTACAGC
Anti-CD3 HCDR1 Protein Sequence-REGN5458
SEQ ID NO: 28
GFTFDDYS
Anti-CD3 HCDR2 DNA Sequence-REGN5458
SEQ ID NO: 29
ATATCATGGAACTCAGGAAGCAAG
Anti-CD3 HCDR2 Protein Sequence-REGN5458
SEQ ID NO: 30
ISWNSGSK
Anti-CD3 HCDR3 DNA Sequence-REGN5458
SEQ ID NO: 31
GCAAAATACGGCAGTGGTTATGGCAAGTTTTATCATTATGGACTGGACGTG
Anti-CD3 HCDR3 Protein Sequence-REGN5458
SEQ ID NO: 32
AKYGSGYGKFYHYGLDV
Anti-CD3 HCVR DNA Sequence-REGN5459
SEQ ID NO: 33
GAAGTACAGCTTGTAGAATCCGGCGGAGGACTGGTACAACCTGGAAGAAGTCTTAGACTGAGTTGCGCAGCTAGTGG
GTTTACATTCGACGATTACAGCATGCATTGGGTGAGGCAAGCTCCTGGTAAAGGATTGGAATGGGTTAGCGGGATAT
CATGGAACTCAGGAAGCATCGGATACGCCGACAGCGTGAAAGGCCGATTTACAATATCTAGGGACAACGCAAAAAAC
TCTCTCTACCTTCAAATGAACTCTCTTAGGGCAGAAGACACAGCATTGTATTATTGCGCAAAATACGGCAGTGGTTA
TGGCAAGTTTTATTATTATGGAATGGACGTGTGGGGACAAGGGACAACAGTGACAGTGAGTAGC
Anti-CD3 HCVR Protein Sequence-REGN5459
SEQ ID NO: 34
EVQLVESGGGLVQPGRSLRLSCAASGFTFDDYSMHWVRQAPGKGLEWVSGISWNSGSIGYADSVKGRFTISRDNAKN
SLYLQMNSLRAEDTALYYCAKYGSGYGKFYYYGMDVWGQGTTVTVSS
Anti-CD3 HCDR1 DNA Sequence-REGN5459
SEQ ID NO: 35
GGGTTTACATTCGACGATTACAGC
Anti-CD3 HCDR1 Protein Sequence-REGN5459
SEQ ID NO: 36
GFTFDDYS
Anti-CD3 HCDR2 DNA Sequence-REGN5459
SEQ ID NO: 37
ATATCATGGAACTCAGGAAGCATC
Anti-CD3 HCDR2 Protein Sequence-REGN5459
SEQ ID NO: 38
ISWNSGSI
Anti-CD3 HCDR3 DNA Sequence-REGN5459
SEQ ID NO: 39
GCAAAATACGGCAGTGGTTATGGCAAGTTTTATTATTATGGAATGGACGTG
Anti-CD3 HCDR3 Protein Sequence-REGN5459
SEQ ID NO: 40
AKYGSGYGKFYYYGMDV
Anti-BCMA Heavy Chain Protein Sequence (IgG4 Heavy Chain Constant Region)
SEQ ID NO: 41
EVQLVESGGGLVQPGGSLRLSCAASGFTFSNFWMTWVRQAPGKGLEWVANMNQDGSEKYYVDSVKGRFTISRDNAKS
SLYLQMNSLRAEDTAVYYCARDREYCISTSCYDDFDYWGQGTLVTVSSASTKGPSVFPLAPCSRSTSESTAALGCLV
KDYFPEPVTVSWNSGALTSGVHTFPAVLQSSGLYSLSSVVTVPSSSLGTKTYTCNVDHKPSNTKVDKRVESKYGPPC
PPCPAPPVAGPSVFLFPPKPKDTLMISRTPEVTCVVVDVSQEDPEVQFNWYVDGVEVHNAKTKPREEQFNSTYRVVS
VLTVLHQDWLNGKEYKCKVSNKGLPSSIEKTISKAKGQPREPQVYTLPPSQEEMTKNQVSLTCLVKGFYPSDIAVEW
ESNGQPENNYKTTPPVLDSDGSFFLYSRLTVDKSRWQEGNVFSCSVMHEALHNHYTQKSLSLSLGK
Anti-CD3 Heavy Chain Protein Sequence (IgG4 Heavy Chain Constant Region with
H435R/Y436F)
SEQ ID NO: 42
EVQLVESGGGLVQPGRSLRLSCAASGFTFDDYSMHWVRQAPGKGLEWVSGISWNSGSKGYADSVKGRFTISRDNAKN
SLYLQMNSLRAEDTALYYCAKYGSGYGKFYHYGLDVWGQGTTVTVSSASTKGPSVFPLAPCSRSTSESTAALGCLVK
DYFPEPVTVSWNSGALTSGVHTFPAVLQSSGLYSLSSVVTVPSSSLGTKTYTCNVDHKPSNTKVDKRVESKYGPPCP
PCPAPPVAGPSVFLFPPKPKDTLMISRTPEVTCVVVDVSQEDPEVQFNWYVDGVEVHNAKTKPREEQFNSTYRVVSV
LTVLHQDWLNGKEYKCKVSNKGLPSSIEKTISKAKGQPREPQVYTLPPSQEEMTKNQVSLTCLVKGFYPSDIAVEWE
SNGQPENNYKTTPPVLDSDGSFFLYSRLTVDKSRWQEGNVFSCSVMHEALHNRFTQKSLSLSPGK
Common Anti-BCMA and Anti-CD3 Light Chain Protein Sequence (Kappa Light Chain
Constant Region)
SEQ ID NO: 43
DIQMTQSPSSLSASVGDRVTITCRASQSISSYLNWYQQKPGKAPKLLIYAASSLQSGVPSRFSGSGSGTDFTLTISS
LQPEDFATYYCQQSYSTPPITFGQGTRLEIKRTVAAPSVFIFPPSDEQLKSGTASVVCLLNNFYPREAKVQWKVDNA
LQSGNSQESVTEQDSKDSTYSLSSTLTLSKADYEKHKVYACEVTHQGLSSPVTKSFNRGEC

[0259] In some embodiments, the anti-BCMA×CD3 bispecific antibody or antigen-binding fragment thereof that can be used the present disclosure comprises: (a) a first antigen binding domain that binds specifically to BCMA; and (b) a second antigen-binding domain that binds specifically to CD3. In one embodiment, the anti-BCMA antigen-binding domain comprises the heavy chain complementarity determining regions (HCDRs) of a heavy chain variable region (HCVR) comprising the amino acid sequence of SEQ ID NO: 2 and the light chain complementarity determining regions (LCDRs) of a light chain variable region (LCVR) comprising the amino acid sequence of SEQ ID NO: 18. In one embodiment, the first antigen-binding domain comprises three HCDRs (HCDR1, HCDR2 and HCDR3) and three LCDRs (LCDR1, LCDR2 and LCDR3), wherein the HCDR1 comprises the amino acid sequence of SEQ ID NO: 4; the HCDR2 comprises the amino acid sequence of SEQ ID NO: 6; the HCDR3 comprises the amino acid sequence of SEQ ID NO: 8; the LCDR1 comprises the amino acid sequence of SEQ ID NO: 20; the LCDR2 comprises the amino acid sequence of SEQ ID NO: 22; and the LCDR3 comprises the amino acid sequence of SEQ ID NO: 24. In one embodiment, the second antigen-binding domain comprises the heavy chain complementarity determining regions (HCDRs) of a heavy chain variable region (HCVR) comprising the amino acid sequence of SEQ ID NO: 26 or 34 and the light chain complementarity determining regions (LCDRs) of a light chain variable region (LCVR) comprising the amino acid sequence of SEQ ID NO: 18. In one embodiment, the second antigen-binding domain comprises three HCDRs (HCDR1, HCDR2 and HCDR3) and three LCDRs (LCDR1, LCDR2 and LCDR3), wherein the HCDR1 comprises the amino acid sequence of SEQ ID NO: 28 or 36; the HCDR2 comprises the amino acid sequence of SEQ ID NO: 30 or 38; the HCDR3 comprises the amino acid sequence of SEQ ID NO: 32 or 40; the LCDR1 comprises the amino acid sequence of SEQ ID NO: 20; the LCDR2 comprises the amino acid sequence of SEQ ID NO: 22; and the LCDR3 comprises the amino acid sequence of SEQ ID NO: 24.

[0260] In one embodiment, the anti-BCMA×CD3 bispecific antibody or antigen-binding fragment thereof comprises: (a) a first antigen-binding domain that comprises HCDR1, HCDR2, and HCDR3 domains, respectively, comprising the amino acid sequences of SEQ ID NOS: 4, 6, and 8, and LCDR1, LCDR2, and LCDR3 domains, respectively, comprising the amino acid sequences of SEQ ID NOS: 20, 22, and 24; and (b) a second antigen binding domain that comprises HCDR1, HCDR2, and HCDR3 domains, respectively, comprising the amino acid sequences of SEQ ID NOS: 28, 30, and 32, and LCDR1, LCDR2, and LCDR3 domains, respectively, comprising the amino acid sequences of SEQ ID NOS: 20, 22, and 24. In one embodiment, the anti-BCMA×CD3 bispecific antibody or antigen-binding fragment thereof comprises: (a) a first antigen-binding domain that comprises a HCVR comprising the amino acid sequence of SEQ ID NO: 2 and a LCVR comprising the amino acid sequence of SEQ ID NO: 18; and (b) a second antigen-binding domain that comprises a HCVR comprising the amino acid sequence of SEQ ID NO: 26 and a LCVR comprising the amino acid sequence of SEQ ID NO: 18.

[0261] In one embodiment, the anti-BCMA×CD3 bispecific antibody or antigen-binding fragment thereof comprises: (a) a first antigen-binding domain that comprises HCDR1, HCDR2, and HCDR3 domains, respectively, comprising the amino acid sequences of SEQ ID NOS: 4, 6, and 8, and LCDR1, LCDR2, and LCDR3 domains, respectively, comprising the amino acid sequences of SEQ ID NOS: 20, 22, and 24; and (b) a second antigen binding domain that comprises HCDR1, HCDR2, and HCDR3 domains, respectively, comprising the amino acid sequences of SEQ ID NOS: 36, 38, and 40, and LCDR1, LCDR2, and LCDR3 domains, respectively, comprising the amino acid sequences of SEQ ID NOS: 20, 22, and 24. In one embodiment, the anti-BCMA/anti-CD3 bispecific antibody or antigen-binding fragment thereof comprises: (a) a first antigen-binding domain that comprises a HCVR comprising the amino acid sequence of SEQ ID NO: 2 and a LCVR comprising the amino acid sequence of SEQ ID NO:18; and (b) a second antigen-binding domain that comprises a HCVR comprising the amino acid sequence of SEQ ID NO: 34 and a LCVR comprising the amino acid sequence of SEQ ID NO: 18.

[0262] Exemplary anti-BCMA×CD3 bispecific antibodies include the fully human bispecific antibodies known as REGN5458 and REGN5459. See, e.g., WO 2020/018820, US 2020/0024356, US 2022/0306758, and U.S. Pat. No. 11,384,153, each of which is herein incorporated by reference. According to certain exemplary embodiments, the methods of the present disclosure comprise the use of REGN5458 or REGN5459, or a bioequivalent thereof. As used herein, the term “bioequivalent” with respect to anti-BCMA×CD3 antibodies refers to antibodies or BCMA×CD3 binding proteins or fragments thereof that are pharmaceutical equivalents or pharmaceutical alternatives having a rate and/or extent of absorption that does not show a significant difference with that of a reference antibody (e.g., REGN5458 or REGN5459) when administered at the same molar dose under similar experimental conditions, either single dose or multiple dose; the term “bioequivalent” also includes antigen-binding proteins that bind to BCMA/CD3 and do not have clinically meaningful differences with the reference antibody (e.g., REGN5458 or REGN5459) with respect to safety, purity and/or potency.

[0263] In some embodiments, the anti-BCMA×CD3 bispecific antibody or antigen-binding fragment thereof comprises: (a) a first antigen-binding domain that comprises a HCVR having at least 90%, 91%, 92%, 93%, 94%, 95%, 96%, 97%, 98%, or 99% sequence identity to the amino acid sequence of SEQ ID NO: 2 and a LCVR having at least 90%, 91%, 92%, 93%, 94%, 95%, 96%, 97%, 98%, or 99% sequence identity to the amino acid sequence of SEQ ID NO: 18; and (b) a second antigen-binding domain that comprises a HCVR having at least 90%, 91%, 92%, 93%, 94%, 95%, 96%, 97%, 98%, or 99% sequence identity to the amino acid sequence of SEQ ID NO: 26 and a LCVR having at least 90%, 91%, 92%, 93%, 94%, 95%, 96%, 97%, 98%, or 99% sequence identity to the amino acid sequence of SEQ ID NO: 18. In some embodiments, the anti-BCMA×CD3 bispecific antibody or antigen-binding fragment thereof comprises: (a) a first antigen-binding domain that comprises three HCDRs (HCDR1, HCDR2 and HCDR3) comprising the amino acid sequences of SEQ ID NOS: 4, 6, and 8, respectively, and a HCVR having at least 90%, 91%, 92%, 93%, 94%, 95%, 96%, 97%, 98%, or 99% sequence identity to the amino acid sequence of SEQ ID NO: 2, and comprises three LCDRs (LCDR1, LCDR2 and LCDR3) comprising the amino acid sequences of SEQ ID NOS: 20, 22, and 24, respectively, and a LCVR having at least 90%, 91%, 92%, 93%, 94%, 95%, 96%, 97%, 98%, or 99% sequence identity to the amino acid sequence of SEQ ID NO: 18; and (b) a second antigen-binding domain that comprises three HCDRs (HCDR1, HCDR2 and HCDR3) comprising the amino acid sequences of SEQ ID NOS: 28, 30, and 32, respectively, and a HCVR having at least 90%, 91%, 92%, 93%, 94%, 95%, 96%, 97%, 98%, or 99% sequence identity to the amino acid sequence of SEQ ID NO: 26, and comprises three LCDRs (LCDR1, LCDR2 and LCDR3) comprising the amino acid sequences of SEQ ID NOS: 20, 22, and 24, respectively, and a LCVR having at least 90%, 91%, 92%, 93%, 94%, 95%, 96%, 97%, 98%, or 99% sequence identity to the amino acid sequence of SEQ ID NO: 18.

[0264] In some embodiments, the anti-BCMA×CD3 bispecific antibody or antigen-binding fragment thereof comprises: (a) a first antigen-binding domain that comprises a HCVR having at least 90%, 91%, 92%, 93%, 94%, 95%, 96%, 97%, 98%, or 99% sequence identity to the amino acid sequence of SEQ ID NO: 2 and a LCVR having at least 90%, 91%, 92%, 93%, 94%, 95%, 96%, 97%, 98%, or 99% sequence identity to the amino acid sequence of SEQ ID NO: 18; and (b) a second antigen-binding domain that comprises a HCVR having at least 90%, 91%, 92%, 93%, 94%, 95%, 96%, 97%, 98%, or 99% sequence identity to the amino acid sequence of SEQ ID NO: 34 and a LCVR having at least 90%, 91%, 92%, 93%, 94%, 95%, 96%, 97%, 98%, or 99% sequence identity to the amino acid sequence of SEQ ID NO: 18. In some embodiments, the anti-BCMA×CD3 bispecific antibody or antigen-binding fragment thereof comprises: (a) a first antigen-binding domain that comprises three HCDRs (HCDR1, HCDR2 and HCDR3) comprising the amino acid sequences of SEQ ID NOS: 4, 6, and 8, respectively, and a HCVR having at least 90%, 91%, 92%, 93%, 94%, 95%, 96%, 97%, 98%, or 99% sequence identity to the amino acid sequence of SEQ ID NO: 2, and comprises three LCDRs (LCDR1, LCDR2 and LCDR3) comprising the amino acid sequences of SEQ ID NOS: 20, 22, and 24, respectively, and a LCVR having at least 90%, 91%, 92%, 93%, 94%, 95%, 96%, 97%, 98%, or 99% sequence identity to the amino acid sequence of SEQ ID NO: 18; and (b) a second antigen-binding domain that comprises three HCDRs (HCDR1, HCDR2 and HCDR3) comprising the amino acid sequences of SEQ ID NOS: 36, 38, and 40, respectively, and a HCVR having at least 90%, 91%, 92%, 93%, 94%, 95%, 96%, 97%, 98%, or 99% sequence identity to the amino acid sequence of SEQ ID NO: 34, and comprises three LCDRs (LCDR1, LCDR2 and LCDR3) comprising the amino acid sequences of SEQ ID NOS: 20, 22, and 24, respectively, and a LCVR having at least 90%, 91%, 92%, 93%, 94%, 95%, 96%, 97%, 98%, or 99% sequence identity to the amino acid sequence of SEQ ID NO: 18.

[0265] The present disclosure also includes variants of the anti-BCMA×CD3 antibodies described herein comprising any of the HCVR, LCVR and/or CDR amino acid sequences disclosed herein with one or more conservative amino acid substitutions. For example, the present disclosure includes use of anti-BCMA×CD3 antibodies having HCVR, LCVR and/or CDR amino acid sequences with, e.g., 10 or fewer, 8 or fewer, 6 or fewer, 4 or fewer, etc. conservative amino acid substitutions relative to any of the HCVR, LCVR and/or CDR amino acid sequences disclosed herein. In some embodiments, the disclosure includes use of an anti-BCMA×CD3 antibody having HCVR, LCVR and/or CDR amino acid sequences with 1, 2, 3, or 4 conservative amino acid substitutions relative to any of the HCVR, LCVR and/or CDR amino acid sequences disclosed herein.

[0266] Other anti-BCMA×CD3 antibodies that can be used in the methods of the present disclosure include, e.g., the antibodies referred to and known in the art as pacanalotamab (AMG420), teclistamab (JNJ-64007957), AMG701, alnuctamab (CC-93269), EM801, EM901, elranatamab (PF-06863135), TNB383B (ABBV-383), and TNB384B, or any of the anti-BCMA×CD3 antibodies set forth, e.g., in WO 2013/072415, WO 2014/140248, WO 2014/122144, WO 2016/166629, WO 2016/079177, WO 2016/020332, WO 2017/031104, WO 2017/223111, WO 2017/134134, WO 2018/083204, or WO 2018/201051. The portions of the publications cited herein that identify anti-BCMA×CD3 antibodies are hereby incorporated by reference.

[0267] In some embodiments, the CDRs disclosed herein are identified according to the Kabat definition. In some embodiments, the CDRs are identified according to the Chothia definition. In some embodiments, the CDRs are identified according to the AbM definition. In some embodiments, the CDRs are identified according to the IMGT definition.

[0268] The bispecific antigen-binding molecules disclosed herein may be bispecific antibodies. In some cases, the bispecific antibody comprises a human IgG heavy chain constant region. In some cases, the human IgG heavy chain constant region is isotype IgG1. In some cases, the human IgG heavy chain constant region is isotype IgG4. In some embodiments, the human IgG heavy chain constant region comprises one or more modifications that increase binding to a neonatal Fc receptor (FcRn). In some embodiments, the human IgG heavy chain constant region comprises one or more modifications that decrease binding to an Fc-gamma receptor (FcγR).

[0269] In some embodiments, the heavy chain constant region attached to the HCVR of the first antigen-binding domain or the heavy chain constant region attached to the HCVR of the second antigen-binding domain, but not both, contains an amino acid modification that reduces Protein A binding relative to a heavy chain of the same isotype without the modification. In some cases, the modification comprises a H435R substitution (EU numbering) in a heavy chain of isotype IgG1 or IgG4. In some cases, the modification comprises a H435R substitution and a Y436F substitution (EU numbering) in a heavy chain of isotype IgG1 or IgG4.

[0270] In some embodiments, the antibody comprises a first heavy chain containing the HCVR of the first antigen-binding domain and a second heavy chain containing the HCVR of the second antigen-binding domain, wherein the first heavy chain comprises residues 1-450 of the amino acid sequence of SEQ ID NO: 41 and the second heavy chain comprises residues 1-449 of the amino acid sequence of SEQ ID NO: 42.

[0271] In some embodiments, the antibody comprises a common light chain containing the LCVR of the first and second antigen-binding domains, wherein the common light chain comprises the amino acid sequence of SEQ ID NO: 43.

[0272] In some embodiments, the anti-BCMA×CD3 bispecific antibody comprises a first heavy chain comprising the amino acid sequence of SEQ ID NO: 41, a second heavy chain comprising the amino acid sequence of SEQ ID NO: 42, and a common light chain comprising the amino acid sequence of SEQ ID NO: 43. In some cases, the mature form of the antibody may not include the C-terminal lysine residues of SEQ ID NOS: 41 and 42. Thus, in some cases the anti-BCMA binding arm comprises a heavy chain comprising residues 1-450 of SEQ ID NO: 41, and the anti-CD3 binding arm comprises a heavy chain comprising residues 1-449 of SEQ ID NO: 42.

[0273] The first antigen-binding domain and the second antigen-binding domain may be directly or indirectly connected to one another to form a bispecific antigen-binding molecule of the present invention. Alternatively, the first antigen-binding domain and the second antigen-binding domain may each be connected to a separate multimerizing domain. The association of one multimerizing domain with another multimerizing domain facilitates the association between the two antigen-binding domains, thereby forming a bispecific antigen-binding molecule. As used herein, a “multimerizing domain” is any macromolecule, protein, polypeptide, peptide, or amino acid that has the ability to associate with a second multimerizing domain of the same or similar structure or constitution. For example, a multimerizing domain may be a polypeptide comprising an immunoglobulin CH3 domain. A non-limiting example of a multimerizing component is an Fc portion of an immunoglobulin (comprising a CH2-CH3 domain), e.g., an Fc domain of an IgG selected from the isotypes IgG1, IgG2, IgG3, and IgG4, as well as any allotype within each isotype group.

[0274] In some embodiments, a bispecific antigen-binding molecule of the present disclosure comprises two multimerizing domains, e.g., two Fc domains that are each individually part of a separate antibody heavy chain. The first and second multimerizing domains may be of the same IgG isotype such as, e.g., IgG1/IgG1, IgG2/IgG2, IgG4/IgG4. Alternatively, the first and second multimerizing domains may be of different IgG isotypes such as, e.g., IgG1/IgG2, IgG1/IgG4, IgG2/IgG4, etc.

[0275] In some embodiments, the multimerizing domain is an Fc fragment or an amino acid sequence of from 1 to about 200 amino acids in length containing at least one cysteine residue. In other embodiments, the multimerizing domain is a cysteine residue, or a short cysteine-containing peptide. Other multimerizing domains include peptides or polypeptides comprising or consisting of a leucine zipper, a helix-loop motif, or a coiled-coil motif.

### III. B Cell Depleting Agents

[0276] In some embodiments, the methods disclosed herein include administering a therapeutically effective amount of a B cell depleting agent to a subject in need thereof. As used herein, a “B cell depleting agent” refers to any molecule capable of specifically binding to a surface antigen on B cells and killing or depleting said B cell. Thus, in general, a B cell depleting agent can be any agent that binds to a B cell surface molecule. In some embodiments, the B cell depleting agent is capable of depleting B cells and plasma cells that express low levels of BCMA.

[0277] In various aspects, the present disclosure provides B cell depleting agents, which may be administered to a subject in need thereof, e.g., either alone or combined with, or administered in combination with, a plasma cell depleting agent (e.g., an anti-BCMA×CD3 bispecific antibody, or a functional fragment thereof), an immunoglobulin depleting agent (e.g., an FcRn blocker such as, e.g., efgartigimod), and/or an immunogen (e.g., a nucleic acid construct described herein, a polypeptide of interest encoded by a nucleic acid construct described herein, a nuclease agent or one or more nucleic acids encoding the nuclease agent as described herein, or a delivery vehicle for the nucleic acid construct, the nuclease agent, or the one or more nucleic acids encoding the nuclease agent as described herein such as, e.g., AAV (e.g., AAV comprising a nucleic acid construct described herein). In some embodiments, plasmapheresis, therapeutic plasma exchange, and/or immunoadsorption may be further combined with the administering of the B cell depleting agent, the plasma cell depleting agent, the immunoglobulin depleting agent, and/or the immunogen. In some embodiments, the subject does not have a pre-existing immunity against the immunogen. For example, in some embodiments, the subject does not have a pre-existing immunity against a nucleic acid construct described herein, a polypeptide of interest encoded by a nucleic acid construct described herein, a nuclease agent or one or more nucleic acids encoding the nuclease agent as described herein, or a delivery vehicle for the nucleic acid construct, the nuclease agent, or the one or more nucleic acids encoding the nuclease agent as described herein. In some such methods in which the subject does not have a pre-existing immunity against the immunogen (e.g., immunogenic delivery vehicle such as, e.g., AAV), the methods do not comprise administering a plasma cell depleting agent (the B cell depleting agent is not used in combination with a plasma cell depleting agent). In some such methods in which the subject does not have a pre-existing immunity against the immunogen (e.g., immunogenic delivery vehicle such as, e.g., AAV), the methods do not comprise administering an immunoglobulin depleting agent (the B cell depleting agent is not used in combination with an immunoglobulin depleting agent).

[0278] In some embodiments, a B cell depleting agent may be administered alone (e.g., as a monotherapy, in the absence of the administration of any other additional immunomodulators [e.g., plasma cell depleting agents, immunoglobulin depleting agents], and optionally, combined with, or administered in combination with, an immunogen) to a subject in need thereof, e.g., a subject without a pre-existing immunity against an immunogen (e.g., an immunogen to be administered to the subject e.g., an immunogenic delivery vehicle such as, e.g., AAV). For example, the subject may be a subject without a pre-existing immunity against a nucleic acid construct described herein, a polypeptide of interest encoded by a nucleic acid construct described herein, a nuclease agent or one or more nucleic acids encoding the nuclease agent as described herein, or a delivery vehicle for the nucleic acid construct, the nuclease agent, or the one or more nucleic acids encoding the nuclease agent as described herein. In some embodiments, the B cell depleting agent may be administered alone to a subject who is immunologically naïve to an immunogen to be administered to the subject (e.g., AAV). In some embodiments, the B cell depleting agent may be administered alone to an AAV seronegative subject, and the subject is further administered an immunogen (e.g., AAV). In some embodiments, a B cell depleting agent may be useful as a prophylactic treatment to prevent or suppress an immune response (e.g., an anti-AAV IgG, IgM, and/or nAb response) to an immunogen (e.g., AAV) in a subject in need thereof (e.g., a subject without a pre-existing immunity to the immunogen).

[0279] In some embodiments, the suppression or prevention of an immune response (e.g., an anti-AAV IgG, IgM, and/or nAb response) to an immunogen in a subject (e.g., a subject without a pre-existing immunity to the immunogen) can be achieved by administering a B cell depleting agent described herein (e.g., an anti-CD20×CD3 bispecific antibody or a functional fragment thereof). Administration of the B cell depleting agent to the subject can suppress or prevent the immune response in the subject following the initial dosing and/or re-dosing of an immunogen (e.g., post-AAV dosing and/or re-dosing). In some embodiments, an immune response may be suppressed in a subject following AAV dosing and/or re-dosing. The immune response may be suppressed by about 1%, about 2%, about 3%, about 4%, about 5%, about 7% about 8%, about 9%, about 10%, from about 10% to about 15%, from about 15% to about 20%, from about 20% to about 25%, from about 25% to about 30%, from about 30% to about 40%, from about 40% to about 50% or more, e.g., relative to an immune response in a subject receiving no immunomodulation treatment or treatment with a conventional anti-CD20 therapeutic alone (e.g., rituximab, or derivatives or equivalents thereof). The immune response may be suppressed by from about 50% to about 60%, from about 50% to about 70%, from about 50% to about 80%, from about 50% to about 90%, more than 60%, from about 60% to about 70%, from about 60% to about 80%, from about 60% to about 90%, more than about 70%, from about 70% to about 80%, from about 70% to about 90%, more than about 80%, from about 80% to about 90%, more than 90%, from about 90% to about 95%, from about 90% to about 98%, more than 95%, from about 95% to about 98%, more than about 98%, or more than about 99%. The immune response may be suppressed by about 50%, about 55%, about 60%, about 65%, about 70%, about 75%, about 80%, about 85%, about 90%, about 91%, about 92%, about 93%, about 94%, about 95%, about 96%, about 97%, about 98%, about 99%, or even 100%. In some embodiments, the immune response is prevented. In some embodiments, an immune response may be suppressed or prevented in a subject following AAV dosing and/or re-dosing in the subject to achieve levels equivalent to, or even below, those of an AAV-naïve subject. In some embodiments, a B cell depleting agent is sufficient to enable effective re-dosing of an immunogen to a subject. The B cell depleting agent can be administered to the subject prior to the re-dosing of the immunogen any number of times and can be used to maintain a suppressed immune response to the immunogen in the subject for any period of time thereafter.

[0280] In some embodiments, a B cell depleting agent is capable of suppressing an anti-immunogen response (e.g., an anti-AAV response) in a subject, and the anti-immunogen response is mounted by the subject in response to repeated doses of the immunogen (e.g., AAV).

[0281] It is contemplated that a B cell depleting agent may be used in the suppression or prevention of an anti-immunogen antibody response (e.g., an anti-AAV antibody response) in a subject, and the suppression or prevention of the anti-immunogen antibody response involves B cell depletion in primary and/or secondary lymphoid tissues and non-lymphoid tissue as well, such as B cell aggregates forming in liver and muscle after AAV administration. Non-limiting examples of primary lymphoid tissues include bone marrow and thymus. In some embodiments, the compositions and methods of the disclosure encompass B cell depletion in secondary lymphoid tissues, for example, and without limitation, spleen and/or lymph nodes. In some embodiments, the compositions and methods of the disclosure relate to B cell depletion in lymph nodes, which is achieved by a B cell depleting agent described herein.

[0282] In some embodiments, the present disclosure provides B cell depleting agents combined with, or administered in combination with, plasma cell depleting agents (e.g., an anti-BCMA×CD3 bispecific antibody, or a functional fragment thereof) described herein to subjects, e.g., subjects with or without a pre-existing immunity against an immunogen (i.e., an immunogen administered to the subject, e.g., an immunogenic delivery vehicle such as, e.g., AAV). In some embodiments, the B cell depleting agent may be administered in combination with a plasma cell depleting agent, an immunoglobulin depleting agent, plasmapheresis, therapeutic plasma exchange, immunoadsorption, and/or an immunogen (e.g., an immunogenic delivery vehicle) disclosed herein. In some embodiments, the B cell depleting agent may be administered to subjects without a pre-existing immunity against an immunogen (i.e., an immunogen to be administered to the subject, e.g., an immunogenic delivery vehicle such as, e.g., AAV) not only alone, but also in combination with a plasma cell depleting agent, an immunoglobulin depleting agent, plasmapheresis, therapeutic plasma exchange, or immunoadsorption, and/or an immunogen (e.g., nucleic acid construct, nuclease agent or CRISPR/Cas system, e.g., in an immunogenic delivery vehicle) (e.g., an immunogenic delivery vehicle such as, e.g., AAV) disclosed herein. In some embodiments, the B cell depleting agent may be administered to subjects with a pre-existing immunity against an immunogen (i.e., an immunogen to be administered to the subject, e.g., an immunogenic delivery vehicle such as, e.g., AAV) in combination with a plasma cell depleting agent, an immunoglobulin depleting agent, plasmapheresis, therapeutic plasma exchange, or immunoadsorption, and/or an immunogen (e.g., nucleic acid construct, nuclease agent or CRISPR/Cas system, e.g., in an immunogenic delivery vehicle) (e.g., an immunogenic delivery vehicle such as, e.g., AAV) disclosed herein. Suitable combinations comprising a plasma cell depleting agent are described in more detail elsewhere herein.

[0283] In some embodiments, the B cell depleting agent is an agent that directly targets a B cell, e.g., an agent that binds to a B cell surface molecule. In some embodiments, the B cell depleting agent causes a reduction in the number of B cells in a subject (e.g., in a blood sample taken from the subject). In some embodiments, a B cell depleting agent may be useful for, e.g., eliminating non-plasma cell (e.g., non-long-lived plasma cell [LLPC] sources of immunogen (e.g., anti-AAV) nAbs. In some embodiments, a B cell depleting agent may be useful for, e.g., preventing formation of non-plasma cell (e.g., non-long-lived plasma cell [LLPC] sources of immunogen (e.g., anti-AAV) nAbs (e.g., in AAV-naïve patients). In some embodiments, the B cell depleting agent may capture a wider range of AAV-specific B cells and plasma cells that may not express high levels of BCMA (e.g., committed memory B cells and early plasmablasts).

[0284] In some embodiments, the B cell depleting agent comprises an anti-CD19 antibody (e.g., MEDI-551, tefasitamab, Inebilizumab, loncastuximab), an anti-CD20 antibody (e.g., rituximab, ocrelizumab, obinutuzumab, ublituximab, or ofatumumab), an anti-CD22 antibody (e.g., epratuzumab), an anti-CD79 antibody (e.g., polatuzumab), a bispecific anti-CD20×CD3 B cell depleting antibody (e.g. odronextamab, glofitamab, mosunetuzumab, epcoritamab), a bispecific anti-CD19×CD3 antibody (e.g., blinatumomab), a bispecific anti-CD22×CD3 antibody (e.g., inotuzumab), or functional fragments thereof, or any combination thereof.

[0285] In some embodiments, the B cell depleting agent is an agent that indirectly targets a B cell, e.g., by targeting a B cell survival factor. In some embodiments, the B cell depleting agent is a BLyS/BAFF inhibitor (e.g., belimumab, lanalumab, BR3-Fc, AMG-570, or AMG-623), an APRIL inhibitor (e.g., telitacicept, atacicept), or a BLyS receptor 3/BAFF receptor inhibitor (e.g., anti-BR3), or any combination thereof.

[0286] In some embodiments, the B cell depleting agent is selected from anti-CD19 antibodies, anti-CD20 antibodies, anti-CD22 antibodies, anti-CD79 antibodies, multispecific antibodies combining two or more of any of said antibody specificities, multispecific antibodies combining any of said antibody specificities with anti-CD3 antibodies, functional fragments of any of said antibodies, and any combinations thereof. In certain embodiments, the B cell depleting agent is an anti-CD20 antibody or a functional fragment thereof. In some embodiments, a multispecific anti-CD20 antibody or functional fragment thereof of the present disclosure targets CD20 and CD19. In some embodiments, the multispecific anti-CD20 antibody or functional fragment thereof is anti-CD19×CD20 bispecific antibody, or functional fragment thereof. In some embodiments, the B cell depleting agent comprises an anti-CD19 antibody and an anti-CD20 antibody.

[0287] In some embodiments, the B cell depleting agent comprises anti-CD19 and anti-CD20 antibodies (also referred to as “anti-CD19/CD20 antibodies” herein), or functional fragments thereof, disclosed herein.

[0288] In a specific embodiment, the B cell depleting agent comprises a bispecific antibody that specifically binds CD3 and CD19. Such antibodies may be referred to herein as, e.g., “anti-CD19/anti-CD3,” or “anti-CD19×CD3” or “CD19×CD3” bispecific antibodies, or other similar terminology.

[0289] In a specific embodiment, the B cell depleting agent comprises a bispecific antibody that specifically binds CD3 and CD20. Such antibodies may be referred to herein as, e.g., “anti-CD20/anti-CD3,” or “anti-CD20×CD3” or “CD20×CD3” bispecific antibodies, or other similar terminology.

[0290] As used herein, the expression “bispecific antibody” refers to an immunoglobulin protein comprising at least a first antigen-binding domain and a second antigen-binding domain. In some embodiments, the first antigen-binding domain specifically binds a first antigen (e.g., CD20), and the second antigen-binding domain specifically binds a second, distinct antigen (e.g., CD3). Each antigen-binding domain of a bispecific antibody comprises a heavy chain variable domain (HCVR) and a light chain variable domain (LCVR), each comprising three CDRs. In the context of a bispecific antibody, the CDRs of the first antigen-binding domain may be designated with the prefix “A” and the CDRs of the second antigen-binding domain may be designated with the prefix “B.” Thus, the CDRs of the first antigen-binding domain may be referred to herein as A-HCDR1, A-HCDR2, and A-HCDR3; and the CDRs of the second antigen-binding domain may be referred to herein as B-HCDR1, B-HCDR2, and B-HCDR3.

[0291] The first antigen-binding domain and the second antigen-binding domain can each be connected to a separate multimerizing domain. As used herein, a “multimerizing domain” is any macromolecule, protein, polypeptide, peptide, or amino acid that has the ability to associate with a second multimerizing domain of the same or similar structure or constitution. In the context of the present invention, the multimerizing component is an Fc portion of an immunoglobulin (comprising a C_{H}2-C_{H}3 domain), e.g., an Fc domain of an IgG selected from the isotypes IgG1, IgG2, IgG3, and IgG4, as well as any allotype within each isotype group.

[0292] Bispecific antibodies of the present invention typically comprise two multimerizing domains, e.g., two Fc domains that are each individually part of a separate antibody heavy chain. The first and second multimerizing domains may be of the same IgG isotype such as, e.g., IgG1/IgG1, IgG2/IgG2, IgG4/IgG4. Alternatively, the first and second multimerizing domains may be of different IgG isotypes such as, e.g., IgG1/IgG2, IgG1/IgG4, IgG2/IgG4, etc.

[0293] Any bispecific antibody format or technology may be used to make the bispecific antigen-binding molecules of the present invention. For example, an antibody or fragment thereof having a first antigen binding specificity can be functionally linked (e.g., by chemical coupling, genetic fusion, noncovalent association or otherwise) to one or more other molecular entities, such as another antibody or antibody fragment having a second antigen-binding specificity to produce a bispecific antigen-binding molecule. Specific exemplary bispecific formats that can be used in the context of the present invention include, without limitation, e.g., scFv-based or diabody bispecific formats, IgG-scFv fusions, dual variable domain (DVD)-Ig, Quadroma, knobs-into-holes, common light chain (e.g., common light chain with knobs-into-holes, etc.), CrossMab, CrossFab, (SEED)body, leucine zipper, Duobody, IgG1/IgG2, dual acting Fab (DAF)-IgG, and Mab² bispecific formats (see, e.g., Klein et al. 2012, mAbs 4:6, 1-11, and references cited therein, for a review of the foregoing formats).

[0294] In the context of bispecific antibodies of the present invention, Fc domains may comprise one or more amino acid changes (e.g., insertions, deletions or substitutions) as compared to the wild-type, naturally occurring version of the Fc domain. For example, the invention includes bispecific antigen-binding molecules comprising one or more modifications in the Fc domain that results in a modified Fc domain having a modified binding interaction (e.g., enhanced or diminished) between Fc and FcRn. In one embodiment, the bispecific antigen-binding molecule comprises a modification in a C_{H}2 or a C_{H}3 region, wherein the modification increases the affinity of the Fc domain to FcRn in an acidic environment (e.g., in an endosome where pH ranges from about 5.5 to about 6.0). Non-limiting examples of such Fc modifications are disclosed in US 2015/0266966, incorporated herein in its entirety.

[0295] The present invention also includes bispecific antibodies comprising a first C_{H}3 domain and a second Ig C_{H}3 domain, wherein the first and second Ig C_{H}3 domains differ from one another by at least one amino acid, and wherein at least one amino acid difference reduces binding of the bispecific antibody to Protein A as compared to a bi-specific antibody lacking the amino acid difference. In one embodiment, the first Ig C_{H}3 domain binds Protein A and the second Ig C_{H}3 domain contains a mutation that reduces or abolishes Protein A binding such as an H95R modification (by IMGT exon numbering; H435R by EU numbering). The second C_{H}3 may further comprise a Y96F modification (by IMGT; Y436F by EU). Further modifications that may be found within the second C_{H}3 include: D16E, L18M, N44S, K52N, V57M, and V821 (by IMGT; D356E, L358M, N384S, K392N, V397M, and V4221 by EU) in the case of IgG1 antibodies; N44S, K52N, and V821 (IMGT; N384S, K392N, and V4221 by EU) in the case of IgG2 antibodies; and Q15R, N44S, K52N, V57M, R69K, E79Q, and V821 (by IMGT; Q355R, N384S, K392N, V397M, R409K, E419Q, and V4221 by EU) in the case of IgG4 antibodies.

[0296] In certain embodiments, the Fc domain may be chimeric, combining Fc sequences derived from more than one immunoglobulin isotype. For example, a chimeric Fc domain can comprise part or all of a C_{H}2 sequence derived from a human IgG1, human IgG2 or human IgG4 C_{H}2 region, and part or all of a C_{H}3 sequence derived from a human IgG1, human IgG2 or human IgG4. A chimeric Fc domain can also contain a chimeric hinge region. For example, a chimeric hinge may comprise an “upper hinge” sequence, derived from a human IgG1, a human IgG2 or a human IgG4 hinge region, combined with a “lower hinge” sequence, derived from a human IgG1, a human IgG2 or a human IgG4 hinge region. A particular example of a chimeric Fc domain that can be included in any of the antigen-binding molecules set forth herein comprises, from N- to C-terminus: [IgG4 C_{H}1]-[IgG4 upper hinge]-[IgG2 lower hinge]-[IgG4 C_{H}2]-[IgG4 C_{H}3]. Another example of a chimeric Fc domain that can be included in any of the antigen-binding molecules set forth herein comprises, from N- to C-terminus: [IgG1 C_{H}1]-[IgG1 upper hinge]-[IgG2 lower hinge]-[IgG4 C_{H}2][IgG1 C_{H}3]. These and other examples of chimeric Fc domains that can be included in any of the antigen-binding molecules of the present invention are described in US Patent Publication No. 2014/0243504, which is herein incorporated in its entirety. Chimeric Fc domains having these general structural arrangements, and variants thereof, can have altered Fc receptor binding, which in turn affects Fc effector function.

### A. CD20×CD3 Antigen-Binding Molecules

[0297] The term “CD20,” as used herein, refers to an antigen which is expressed on B cells and which consists of a non-glycosylated phosphoprotein expressed on the cell membranes of mature B cells. The human CD20 protein can have the amino acid sequence as in NCBI Reference Sequence NP_690605.1. As used herein, the expression “anti-CD20 antibody” includes monovalent antibodies with a single specificity, such as RITUXAN® (rituximab), as described in U.S. Pat. No. 7,879,984. Exemplary anti-CD20 antibodies are also described in U.S. Pat. No. 7,879,984 and PCT International Application No. PCT/US2013/060511, filed on Sep. 19, 2013, each incorporated by reference herein.

[0298] In some exemplary embodiments, the CD20 targeting agent used in the disclosed methods is a multispecific (e.g., bispecific) antibody, or a functional fragment thereof, that specifically binds CD20 and CD3 (e.g., an anti-CD20×CD3 bispecific antibody). The anti-CD20×CD3 multispecific (e.g., bispecific) antibodies are useful for specific targeting and T-cell-mediated killing of cells that express CD20. The terms “antibody,” “antigen-binding fragment,” “human antibody,” “recombinant antibody,” and other related terminology are defined above. In the context of anti-CD20×CD3 antibodies and antigen-binding fragments thereof, the present disclosure includes the use of bispecific antibodies wherein one arm of an immunoglobulin is specific for CD20 or a fragment thereof, and the other arm of the immunoglobulin is specific for a second therapeutic target (e.g., CD3 on T-cells). Exemplary bispecific formats that can be used in the context of the present disclosure include, without limitation, e.g., scFv-based or diabody bispecific formats, IgG-scFv fusions, dual variable domain (DVD)-Ig, Quadroma, knobs-into-holes, common light chain (e.g., common light chain with knobs-into-holes, etc.), CrossMab, CrossFab, (SEED) body, leucine zipper, Duobody, IgG1/IgG2, dual acting Fab (DAF)-IgG, and Mabe bispecific formats (see, e.g., Klein et al. 2012, mAbs 4(6):653-663, and references cited therein, for a review of the foregoing formats). Bispecific antibodies can also be constructed using peptide/nucleic acid conjugation, e.g., wherein unnatural amino acids with orthogonal chemical reactivity are used to generate site-specific antibody-oligonucleotide conjugates which then self-assemble into multimeric complexes with defined composition, valency and geometry. (See, e.g., Kazane et al., J. Am. Chem. Soc., 2013, 135(1):340-46).

[0299] The anti-CD20×CD3 bispecific antibodies are capable of simultaneously binding to human CD3 and human CD20. According to certain embodiments, the anti-CD20×CD3 bispecific antibodies specifically interact with cells that express CD3 and/or CD20. The extent to which the anti-CD20×CD3 bispecific antibodies binds cells that express CD3 and/or CD20 can be assessed by fluorescence activated cell sorting (FACS). In certain embodiments, the anti-CD20×CD3 bispecific antibodies specifically bind human T-cell lines which express CD3 (e.g., Jurkat), human B-cell lines which express CD20 (e.g., Raji), and primate T-cells (e.g., cynomolgus peripheral blood mononuclear cells [PBMCs]).

[0300] In some embodiments, the anti-CD20×CD3 bispecific antigen-binding molecule comprises a first antigen-binding domain (D1) that binds an epitope of CD20 (e.g., human CD20), and a second antigen-binding domain (D2) that binds an epitope of CD3 (e.g., human CD3).

[0301] According to certain exemplary embodiments of the present invention, the bispecific anti-CD20×CD3 antibody, or antigen-binding fragment thereof comprises heavy chain variable regions (A-HCVR and B-HCVR), light chain variable region (LCVR), and/or complementarity determining regions (CDRs) comprising any of the amino acid sequences of the bispecific anti-CD20×CD3 antibodies as set forth in US Patent Publication No. 20150266966, incorporated herein by reference in its entirety for all purposes. In certain exemplary embodiments, the bispecific anti-CD20×CD3 antibody or antigen-binding fragment thereof that can be used in the context of the methods of the present invention comprises: (a) a first antigen-binding arm comprising the heavy chain complementarity determining regions (A-HCDR1, A-HCDR2 and A-HCDR3) of a heavy chain variable region (A-HCVR) comprising the amino acid sequence of SEQ ID NO: 44 and the light chain complementarity determining regions (LCDRs) of a light chain variable region (LCVR) comprising the amino acid sequence of SEQ ID NO: 45; and (b) a second antigen-binding arm comprising the heavy chain CDRs (B-HCDR1, B-HCDR2 and B-HCDR3) of a HCVR (B-HCVR) comprising the amino acid sequence of SEQ ID NO: 46 and the light chain CDRs of a LCVR comprising the amino acid sequence of SEQ ID NO: 45. According to certain embodiments, the A-HCDR1 comprises the amino acid sequence of SEQ ID NO: 47; the A-HCDR2 comprises the amino acid sequence of SEQ ID NO: 48; the A-HCDR3 comprises the amino acid sequence of SEQ ID NO: 49; the LCDR1 comprises the amino acid sequence of SEQ ID NO: 50; the LCDR2 comprises the amino acid sequence of SEQ ID NO: 51; the LCDR3 comprises the amino acid sequence of SEQ ID NO: 52; the B-HCDR1 comprises the amino acid sequence of SEQ ID NO: 53; the B-HCDR2 comprises the amino acid sequence of SEQ ID NO: 54; and the B-HCDR3 comprises the amino acid sequence of SEQ ID NO: 55. In yet other embodiments, the bispecific anti-CD20×CD3 antibody or antigen-binding fragment thereof comprises: (a) a first antigen-binding arm comprising a HCVR (A-HCVR) comprising SEQ ID NO: 44 and a LCVR comprising SEQ ID NO: 45; and (b) a second antigen-binding arm comprising a HCVR (B-HCVR) comprising SEQ ID NO: 46 and a LCVR comprising SEQ ID NO: 45.

[0302] In some embodiments, the anti-CD20×CD3 bispecific antibody or functional fragment thereof comprises a first antigen-binding domain that specifically binds to CD20 comprising three heavy chain CDRs (HCDR1, HCDR2 and HCDR3) contained within a heavy chain variable region (HCVR) comprising the amino acid sequence of SEQ ID NO: 44, and three light chain CDRs (LCDR1, LCDR2 and LCDR3) contained within a light chain variable region (LCVR) comprising the amino acid sequence of SEQ ID NO: 45.

[0303] In some embodiments, the first antigen-binding domain that specifically binds to CD20 comprises a HCDR1 comprising the amino acid sequence of SEQ ID NO: 47, a HCDR2 comprising the amino acid sequence of SEQ ID NO: 48, a HCDR3 comprising the amino acid sequence of SEQ ID NO: 49, a LCDR1 comprising the amino acid sequence of SEQ ID NO: 50, a LCDR2 comprising the amino acid sequence of SEQ ID NO: 51, and a LCDR3 comprising the amino acid sequence of SEQ ID NO: 52.

[0304] In some embodiments, the anti-CD20×CD3 bispecific antibody or functional fragment thereof comprises a second antigen-binding domain that specifically binds to CD3 comprising three heavy chain CDRs (HCDR1, HCDR2 and HCDR3) contained within a heavy chain variable region (HCVR) comprising the amino acid sequence of SEQ ID NO: 46, and three light chain CDRs (LCDR1, LCDR2 and LCDR3) contained within a light chain variable region (LCVR) comprising the amino acid sequence of SEQ ID NO: 45.

[0305] In some embodiments, the second antigen-binding domain that specifically binds to CD3 comprises a HCDR1 comprising the amino acid sequence of SEQ ID NO: 53, a HCDR2 comprising the amino acid sequence of SEQ ID NO: 54, a HCDR3 comprising the amino acid sequence of SEQ ID NO: 55, a LCDR1 comprising the amino acid sequence of SEQ ID NO: 50, a LCDR2 comprising the amino acid sequence of SEQ ID NO: 51, and a LCDR3 comprising the amino acid sequence of SEQ ID NO: 52.

[0306] In some embodiments, the anti-CD20×CD3 bispecific antibody or functional fragment thereof comprises: a first antigen-binding domain that comprises HCDR1, HCDR2, and HCDR3 comprising the amino acid sequences of SEQ ID NOS: 47, 48, and 49, respectively, and LCDR1, LCDR2, and LCDR3 comprising the amino acid sequences of SEQ ID NOS: 50, 51, and 52, respectively; and a second antigen-binding domain that comprises HCDR1, HCDR2, and HCDR3 comprising the amino acid sequences of SEQ ID NOS: 53, 54, and 55, respectively, and LCDR1, LCDR2, and LCDR3 comprising the amino acid sequences of SEQ ID NOS: 50, 51, and 52, respectively.

[0307] Other bispecific anti-CD20×CD3 antibodies that can be used in the context of the methods of the present invention include, e.g., any of the antibodies as set forth in US 2014/0088295, US 2015/0166661, and US 2017/0174781, each of which is herein incorporated by reference in its entirety for all purposes. An exemplary bispecific anti-CD20×CD3 antibody that can be used in the context of the methods of the present invention is the bispecific anti-CD20×CD3 antibody known as REGN1979 or bsAB1.

[0308] In some exemplary embodiments, an anti-CD20×CD3 bispecific antibody or antigen-binding fragment thereof that can be used in the context of the present disclosure comprising a HCVR, a LCVR, and/or CDRs comprising the amino acid sequences of REGN1979 as set forth in Table 2 below.

TABLE 2
Amino Acid Sequences of Exemplary Anti-CD20xCD3 Bispecific
Antibodies.

| | Anti-CD20 | | | | Anti-CD3 | | | | Common | | | |
|---|---|---|---|---|---|---|---|---|---|---|---|---|
| Bispecific | First Antigen-Binding | | | | Second Antigen-Binding | | | | Light Chain Variable | | | |
| antibody | Domain | | | | Domain | | | | Region | | | |
| identifier | HCVR | HCDR1 | HCDR2 | HCDR3 | HCVR | HCDR1 | HCDR2 | HCDR3 | LCVR | LCDR1 | LCDR2 | LCDR3 |
| REGN1979 | 44 | 47 | 48 | 49 | 46 | 53 | 54 | 55 | 45 | 50 | 51 | 52 |

Anti-CD20 HCVR Protein Sequence
SEQ ID NO: 44
EVQLVESGGGLVQPGRSLRLSCVASGFTENDYAMHWVRQAPGKGL
EWVSVISWNSDSIGYADSVKGRFTISRDNAKNSLYLQMHSLRAED
TALYYCAKDNHYGSGSYYYYQYGMDVWGQGTTVTVSS
Common LCVR Protein Sequence
SEQ ID NO: 45
EIVMTQSPATLSVSPGERATLSCRASQSVSSNLAWYQQKPGQAPR
LLIYGASTRATGIPARFSGSGSGTEFTLTISSLQSEDFAVYYCQH
YINWPLTFGGGTKVEIKR
Anti-CD3 HCVR Protein Sequence
SEQ ID NO: 46
EVQLVESGGGLVQPGRSLRLSCAASGFTEDDYTMHWVRQAPGKGL
EWVSGISWNSGSIGYADSVKGRFTISRDNAKKSLYLQMNSLRAED
TALYYCAKDNSGYGHYYYGMDVWGQGTTVTVAS
Anti-CD20 HCDR1 Protein Sequence
SEQ ID NO: 47
GFTENDYA
Anti-CD20 HCDR2 Protein Sequence
SEQ ID NO: 48
ISWNSDSI
Anti-CD20 HCDR3 Protein Sequence
SEQ ID NO: 49
AKDNHYGSGSYYYYQYGMDV
Common LCDR1 Protein Sequence
SEQ ID NO: 50
QSVSSN
Common LCDR2 Protein Sequence
SEQ ID NO: 51
GAS
Common LCDR3 Protein Sequence
SEQ ID NO: 52
QHYINWPLT
Anti-CD3 HCDR1 Protein Sequence
SEQ ID NO: 53
GFTFDDYT
Anti-CD3 HCDR2 Protein Sequence
SEQ ID NO: 54
ISWNSGSI
Anti-CD3 HCDR3 Protein Sequence
SEQ ID NO: 55
AKDNSGYGHYYYGMDV

[0309] In some embodiments, the anti-CD20×CD3 bispecific antibody or antigen-binding fragment thereof that can be used in the present disclosure comprises: (a) a first antigen binding domain that binds specifically to CD20; and (b) a second antigen-binding domain that binds specifically to CD3. In one embodiment, the anti-CD20 antigen-binding domain comprises the heavy chain complementarity determining regions (A-HCDRs) of a heavy chain variable region (A-HCVR) comprising the amino acid sequence of SEQ ID NO: 44 and the light chain complementarity determining regions (LCDRs) of a light chain variable region (LCVR) comprising the amino acid sequence of SEQ ID NO: 45. In one embodiment, the first antigen-binding domain comprises three HCDRs (A-HCDR1, A-HCDR2 and A-HCDR3) and three LCDRs (LCDR1, LCDR2 and LCDR3), wherein the A-HCDR1 comprises the amino acid sequence of SEQ ID NO: 47; the A-HCDR2 comprises the amino acid sequence of SEQ ID NO: 48; the A-HCDR3 comprises the amino acid sequence of SEQ ID NO: 49; the LCDR1 comprises the amino acid sequence of SEQ ID NO: 50; the LCDR2 comprises the amino acid sequence of SEQ ID NO: 51; and the LCDR3 comprises the amino acid sequence of SEQ ID NO: 52.

[0310] In one embodiment, the second antigen-binding domain comprises the heavy chain complementarity determining regions (B-HCDRs) of a heavy chain variable region (B-HCVR) comprising the amino acid sequence of SEQ ID NO: 46 and the light chain complementarity determining regions (LCDRs) of a light chain variable region (LCVR) comprising the amino acid sequence of SEQ ID NO: 45. In one embodiment, the second antigen-binding domain comprises three HCDRs (B-HCDR1, B-HCDR2 and B-HCDR3) and three LCDRs (LCDR1, LCDR2 and LCDR3), wherein the B-HCDR1 comprises the amino acid sequence of SEQ ID NO: 53; the B-HCDR2 comprises the amino acid sequence of SEQ ID NO: 54; the B-HCDR3 comprises the amino acid sequence of SEQ ID NO: 55; the LCDR1 comprises the amino acid sequence of SEQ ID NO: 50; the LCDR2 comprises the amino acid sequence of SEQ ID NO: 51; and the LCDR3 comprises the amino acid sequence of SEQ ID NO: 52.

[0311] In one embodiment, the anti-CD20×CD3 bispecific antibody or antigen-binding fragment thereof comprises: (a) a first antigen-binding domain that comprises A-HCDR1, A-CDR2, and A-HCDR3 domains, respectively, comprising the amino acid sequences of SEQ ID NOs: 47, 48, and 49, and LCDR1, LCDR2, and LCDR3 domains, respectively, comprising the amino acid sequences of SEQ ID NOs: 50, 51, and 52; and (b) a second antigen binding domain that comprises B-HCDR1, B-HCDR2, and B-HCDR3 domains, respectively, comprising the amino acid sequences of SEQ ID NOs: 53, 54, and 55, and LCDR1, LCDR2, and LCDR3 domains, respectively, comprising the amino acid sequences of SEQ ID NOs: 50, 51, and 52. In one embodiment, the anti-CD20×CD3 bispecific antibody or antigen-binding fragment thereof comprises: (a) a first antigen-binding domain that comprises a A-HCVR comprising the amino acid sequence of SEQ ID NO: 44 and a LCVR comprising the amino acid sequence of SEQ ID NO: 45; and (b) a second antigen-binding domain that comprises a B-HCVR comprising the amino acid sequence of SEQ ID NO: 46 and a LCVR comprising the amino acid sequence of SEQ ID NO: 45.

[0312] Exemplary anti-CD20×CD3 bispecific antibodies include the fully human bispecific antibody known as REGN1979. See, e.g., US 2014/0088295, US 2015/0166661, and US 2017/0174781, each of which is herein incorporated by reference. According to certain exemplary embodiments, the methods of the present disclosure comprise the use of REGN1979, or a bioequivalent thereof. As used herein, the term “bioequivalent” with respect to anti-CD20×CD3 antibodies refers to antibodies or CD20×CD3 binding proteins or fragments thereof that are pharmaceutical equivalents or pharmaceutical alternatives having a rate and/or extent of absorption that does not show a significant difference with that of a reference antibody (e.g., REGN1979) when administered at the same molar dose under similar experimental conditions, either single dose or multiple dose; the term “bioequivalent” also includes antigen-binding proteins that bind to CD20/CD3 and do not have clinically meaningful differences with the reference antibody (e.g., REGN1979) with respect to safety, purity, and/or potency.

[0313] In some embodiments, the anti-CD20×CD3 bispecific antibody or antigen-binding fragment thereof comprises: (a) a first antigen-binding domain that comprises a A-HCVR having at least 90%, 91%, 92%, 93%, 94%, 95%, 96%, 97%, 98%, or 99% sequence identity to the amino acid sequence of SEQ ID NO: 44 and a LCVR having at least 90%, 91%, 92%, 93%, 94%, 95%, 96%, 97%, 98%, or 99% sequence identity to the amino acid sequence of SEQ ID NO: 45; and (b) a second antigen-binding domain that comprises a B-HCVR having at least 90%, 91%, 92%, 93%, 94%, 95%, 96%, 97%, 98%, or 99% sequence identity to the amino acid sequence of SEQ ID NO: 46 and a LCVR having at least 90%, 91%, 92%, 93%, 94%, 95%, 96%, 97%, 98%, or 99% sequence identity to the amino acid sequence of SEQ ID NO: 45. In some embodiments, the anti-CD20×CD3 bispecific antibody or antigen-binding fragment thereof comprises: (a) a first antigen-binding domain that comprises three HCDRs (A-HCDR1, A-HCDR2 and A-HCDR3) comprising the amino acid sequences of SEQ ID NOs: 47, 48, and 49, respectively, and an A-HCVR having at least 90%, 91%, 92%, 93%, 94%, 95%, 96%, 97%, 98%, or 99% sequence identity to the amino acid sequence of SEQ ID NO: 44, and comprises three LCDRs (LCDR1, LCDR2 and LCDR3) comprising the amino acid sequences of SEQ ID NOs: 50, 51, and 52, respectively, and a LCVR having at least 90%, 91%, 92%, 93%, 94%, 95%, 96%, 97%, 98%, or 99% sequence identity to the amino acid sequence of SEQ ID NO: 45; and (b) a second antigen-binding domain that comprises three HCDRs (B-HCDR1, B-HCDR2 and B-HCDR3) comprising the amino acid sequences of SEQ ID NOs: 53, 54, and 55, respectively, and a B-HCVR having at least 90%, 91%, 92%, 93%, 94%, 95%, 96%, 97%, 98%, or 99% sequence identity to the amino acid sequence of SEQ ID NO: 46, and comprises three LCDRs (LCDR1, LCDR2 and LCDR3) comprising the amino acid sequences of SEQ ID NOs: 50, 51, and 52, respectively, and a LCVR having at least 90%, 91%, 92%, 93%, 94%, 95%, 96%, 97%, 98%, or 99% sequence identity to the amino acid sequence of SEQ ID NO:45.

[0314] The present disclosure also includes variants of the anti-CD20×CD3 antibodies described herein comprising any of the HCVR, LCVR, and/or CDR amino acid sequences disclosed herein with one or more conservative amino acid substitutions. For example, the present disclosure includes use of anti-CD20×CD3 antibodies having HCVR, LCVR, and/or CDR amino acid sequences with, e.g., 10 or fewer, 8 or fewer, 6 or fewer, 4 or fewer, etc. conservative amino acid substitutions relative to any of the HCVR, LCVR, and/or CDR amino acid sequences disclosed herein. In some embodiments, the disclosure includes use of an anti-CD20×CD3 antibody having HCVR, LCVR, and/or CDR amino acid sequences with 1, 2, 3, or 4 conservative amino acid substitutions relative to any of the HCVR, LCVR, and/or CDR amino acid sequences disclosed herein.

[0315] In some embodiments, the CDRs disclosed herein are identified according to the Kabat definition. In some embodiments, the CDRs are identified according to the Chothia definition. In some embodiments, the CDRs are identified according to the AbM definition. In some embodiments, the CDRs are identified according to the IMGT definition.

[0316] In some embodiments, the anti-CD20×CD3 bispecific antibody or functional fragment thereof comprises a human IgG heavy chain constant region. In some embodiments, the human IgG heavy chain constant region is isotype IgG4 or IgG1. In some embodiments, the human IgG heavy chain constant region comprises one or more modifications that increase binding to a neonatal Fc receptor (FcRn). In some embodiments, the human IgG heavy chain constant region comprises one or more modifications that decrease binding to an Fc-gamma receptor (FcγR).

### IV. Sequence Variants

[0317] The antigen-binding molecules of the present disclosure may comprise one or more amino acid substitutions, insertions, and/or deletions in the framework and/or CDR regions of the heavy and/or light chain variable domains as compared to the corresponding germline sequences from which the individual antigen-binding domains were derived. Such mutations can be readily ascertained by comparing the amino acid sequences disclosed herein to germ line sequences available from, for example, public antibody sequence databases. The antigen-binding molecules of the present disclosure may comprise antigen binding fragments which are derived from any of the exemplary amino acid sequences disclosed herein, wherein one or more amino acids within one or more framework and/or CDR regions are mutated to the corresponding residue(s) of the germline sequence from which the antibody was derived, or to the corresponding residue(s) of another human germline sequence, or to a conservative amino acid substitution of the corresponding germline residue(s) (such sequence changes are referred to herein collectively as “germline mutations”). A person of ordinary skill in the art, starting with the heavy and light chain variable region sequences disclosed herein, can easily produce numerous antibodies and antigen-binding fragments which comprise one or more individual germline mutations or combinations thereof. In certain embodiments, all of the framework and/or CDR residues within the V_{H} and/or V_{L} domains are mutated back to the residues found in the original germline sequence from which the antigen-binding domain was originally derived. In other embodiments, only certain residues are mutated back to the original germline sequence, e.g., only the mutated residues found within the first 8 amino acids of FR1 or within the last 8 amino acids of FR4, or only the mutated residues found within CDR1, CDR2 or CDR3. In other embodiments, one or more of the framework and/or CDR residue(s) are mutated to the corresponding residue(s) of a different germline sequence (i.e., a germline sequence that is different from the germ line sequence from which the antigen-binding domain was originally derived). Furthermore, the antigen-binding domains may contain any combination of two or more germline mutations within the framework and/or CDR regions, e.g., wherein certain individual residues are mutated to the corresponding residue of a particular germ line sequence while certain other residues that differ from the original germ line sequence are maintained or are mutated to the corresponding residue of a different germline sequence. Once obtained, antigen-binding domains that contain one or more germline mutations can be easily tested for one or more desired property such as, improved binding specificity, increased binding affinity, improved, or enhanced antagonistic or agonistic biological properties, reduced immunogenicity, etc. Bispecific antigen-binding molecules comprising one or more antigen-binding domains obtained in this general manner are encompassed within the present disclosure.

[0318] The present disclosure also includes antigen-binding molecules wherein one or both antigen-binding domains comprise variants of any of the HCVR, LCVR, and/or CDR amino acid sequences disclosed herein having one or more conservative substitutions. For example, the present disclosure includes antigen-binding molecules comprising an antigen-binding domain having HCVR, LCVR, and/or CDR amino acid sequences with, e.g., 10 or fewer, 9 or fewer, 8 or fewer, 7 or fewer, 6 or fewer, 5 or fewer, 4 or fewer, 3 or fewer, 2 or fewer, or 1 conservative amino acid substitution(s) relative to any of the HCVR, LCVR, and/or CDR amino acid sequences disclosed herein. In some embodiments, the disclosure includes use of an antibody having HCVR, LCVR and/or CDR amino acid sequences with 1, 2, 3, or 4 conservative amino acid substitutions relative to any of the HCVR, LCVR and/or CDR amino acid sequences disclosed herein. A “conservative amino acid substitution” is one in which an amino acid residue is substituted by another amino acid residue having a side chain (R group) with similar chemical properties (e.g., charge or hydrophobicity). In general, a conservative amino acid substitution will not substantially change the functional properties of a protein. Examples of groups of amino acids that have side chains with similar chemical properties include (1) aliphatic side chains: glycine, alanine, valine, leucine and isoleucine; (2) aliphatic-hydroxyl side chains: serine and threonine; (3) amide-containing side chains: asparagine and glutamine; (4) aromatic side chains: phenylalanine, tyrosine, and tryptophan; (5) basic side chains: lysine, arginine, and histidine; (6) acidic side chains: aspartate and glutamate, and (7) sulfur-containing side chains are cysteine and methionine. Preferred conservative amino acids substitution groups are valine-leucine-isoleucine, phenylalanine-tyrosine, lysine-arginine, alanine-valine, glutamate-aspartate, and asparagine-glutamine. Alternatively, a conservative replacement is any change having a positive value in the PAM250 log-likelihood matrix disclosed in Gonnet et al. (1992) Science 256: 1443-1445. A “moderately conservative” replacement is any change having a nonnegative value in the PAM250 log-likelihood matrix.

[0319] The present disclosure also includes antigen-binding molecules comprising an antigen binding domain with a HCVR, LCVR, and/or CDR amino acid sequence that is substantially identical to any of the HCVR, LCVR, and/or CDR amino acid sequences disclosed herein. In some embodiments, an antigen-binding molecule comprises a HCVR, LCVR, and/or CDR amino acid sequence having at least 85% sequence identity, e.g., at least 90%, at least 91%, at least 92%, at least 93%, at least 94%, at least 95%, at least 96%, at least 97%, at least 98% or at least 99% sequence identity, to a sequence disclosed in Table 1. In some embodiments, an antigen-binding molecule comprises a HCVR, LCVR, and/or CDR amino acid sequence having at least 85% sequence identity, e.g., at least 90%, at least 91%, at least 92%, at least 93%, at least 94%, at least 95%, at least 96%, at least 97%, at least 98% or at least 99% sequence identity, to a sequence disclosed in Table 1, wherein the differences in the amino acid residue(s) relative to the sequence disclosed in Table 1 are conservative substitutions or moderately conservative substitutions.

### V. Antigen-Binding Proteins Comprising Fc Modifications

[0320] In some embodiments, an antigen-binding molecule as disclosed herein (e.g., a BCMA×CD3 bispecific antigen-binding molecule such as an anti-BCMA×CD3 bispecific antibody or a CD20×CD3 bispecific antigen-binding molecule such as an anti-CD20×CD3 bispecific antibody) comprises an Fc domain comprising one or more modifications or mutations that enhance or diminish antibody binding to the FcRn receptor. For example, the present disclosure includes antigen-binding molecules comprising one or more mutations in the CH2 and/or CH3 region of the Fc domain, wherein the mutation(s) increases the affinity of the Fc domain to FcRn in an acidic environment (e.g., in an endosome where pH ranges from about 5.5 to about 6.0). Such mutations may result in an increase in serum half-life of the antibody when administered to an animal.

[0321] Non-limiting examples of such Fc modifications include, e.g., a modification at position 250 (e.g., E or Q); 250 and 428 (e.g., L or F); 252 (e.g., UY/F/W or T), 254 (e.g., S or T), and 256 (e.g., S/R/Q/E/D or T); or a modification at position 428 and/or 433 (e.g., H/UR/S/P/Q or K) and/or 434 (e.g., H/F or Y); or a modification at position 250 and/or 428; or a modification at position 307 or 308 (e.g., 308F, V308F), and 434. In one embodiment, the modification comprises a 428L (e.g., M428L) and 434S (e.g., N434S) modification; a 428L, 259I (e.g., V259I), and 308F (e.g., V308F) modification; a 433K (e.g., H433K) and a 434 (e.g., 434Y) modification; a 252, 254, and 256 (e.g., 252Y, 254T, and 256E) modification; a 250Q and 428L modification (e.g., T250Q and M428L); and a 307 and/or 308 modification (e.g., 308F or 308P). See, e.g., Ko et al., BioDrugs 2021, 35:147-157.

[0322] In certain embodiments, a BCMA×CD3 bispecific antigen-binding molecule or a CD20×CD3 bispecific antigen-binding molecule comprises an Fc domain comprising one or more pairs or groups of mutations selected from the group consisting of: 250Q and 248L (e.g., T250Q and M248L); 252Y, 254T and 256E (e.g., M252Y, S254T and T256E); 428L and 434S (e.g., M428L and N434S); and 433K and 434F (e.g., H433K and N434F). In some embodiments, the human IgG heavy chain constant region comprises one or more modifications that increase binding to a neonatal Fc receptor (FcRn). For example, in some embodiments the human IgG heavy chain constant region comprises M252Y, S254T, and T256E mutations.

[0323] In some embodiments, the BCMA×CD3 bispecific antigen-binding molecules or the CD20×CD3 bispecific antigen-binding molecules of the present disclosure comprise a modified Fc domain having reduced effector function. As used herein, a “modified Fc domain having reduced effector function” means any Fc portion of an immunoglobulin that has been modified, mutated, truncated, etc., relative to a wild-type, naturally occurring Fc domain such that a molecule comprising the modified Fc exhibits a reduction in the severity or extent of at least one effect selected from the group consisting of cell killing (e.g., ADCC and/or CDC), complement activation, phagocytosis and opsonization, relative to a comparator molecule comprising the wild-type, naturally occurring version of the Fc portion. In certain embodiments, a “modified Fc domain having reduced effector function” is an Fc domain with reduced or attenuated binding to an Fc receptor (e.g., FcγR).

[0324] In certain embodiments, a modified Fc domain having reduced binding to an Fc receptor, such as an Fc-gamma receptor (e.g., Fcγ receptor, e.g., FcγRI, FcγRIIA, FcγRIIB, or FcγRIIIA), is a variant IgG1 Fc or a variant IgG4 Fc comprising one or more substitutions or modifications in the hinge region and/or a CH region (e.g., CH2). For example, a modified Fc domain may comprise a variant IgG1 Fc wherein at least one amino acid of an IgG1 Fc hinge region and/or CH region is replaced with the corresponding amino acid from an IgG2 Fc hinge region and/or CH region. In certain embodiments, the modified Fc domain is a variant IgG1 Fc or a variant IgG4 Fc comprising one or more substitutions or modifications in the hinge region. For example, a modified Fc domain may comprise a variant IgG1 Fc wherein at least one amino acid of the IgG1 Fc hinge region is replaced with the corresponding amino acid from the IgG2 Fc hinge region. In one example, the variant IgG1 Fc can comprise a human IgG2 lower hinge amino acid sequence or can comprise both a human IgG2 lower hinge amino acid sequence and a human IgG4 CH2 amino acid sequence. For example, in some embodiments, the heavy chain constant region can comprise a variant IgG1 Fc in which positions 233-236 by EU numbering are occupied by PVA. See, e.g., U.S. Pat. No. 10,988,537, the disclosure of which is hereby incorporated by reference in its entirety. In some embodiments, the heavy chain constant region can comprise a variant IgG1 Fc in which the IgG1 CH2 region is replaced with the corresponding amino acids from the IgG4 CH2 region and in which positions 233-236 by EU numbering are occupied by PVA. Alternatively, a modified Fc domain may comprise a variant IgG4 Fc wherein at least one amino acid of an IgG4 Fc hinge region and/or CH region is replaced with the corresponding amino acid from an IgG2 Fc hinge region and/or CH region. Alternatively, a modified Fc domain may comprise a variant IgG4 Fc wherein at least one amino acid of the IgG4 Fc hinge region is replaced with the corresponding amino acid from the IgG2 Fc hinge region. In one example, the variant IgG4 Fc can comprise a human IgG2 lower hinge amino acid sequence. For example, in some embodiments, the heavy chain constant region can comprise a variant IgG4 Fc in which positions 233-236 by EU numbering are occupied by PVA. See, e.g., U.S. Pat. No. 10,988,537, the disclosure of which is hereby incorporated by reference in its entirety. In some embodiments, a modified Fc domain comprises a modified hinge region in which each of positions 233-236 by EU numbering is occupied by G or is unoccupied. In some embodiments, a modified Fc domain comprises modifications in which each of positions 233-236 by EU numbering is occupied by G or is unoccupied. For example, in some embodiments, a modified Fc domain can comprise a modified hinge region in which positions 233-236 by EU numbering are occupied by GGG. See, e.g., U.S. Pat. No. 11,518,807, the disclosure of which is hereby incorporated by reference in its entirety. In some embodiments, the heavy chain constant region can comprise a variant IgG1 Fc in which the IgG1 CH2 region is replaced with the corresponding amino acids from the IgG4 CH2 region and in which positions 233-236 by EU numbering are occupied by GGG. Non-limiting, exemplary modified Fc regions that can be used in the context of the present disclosure are set forth in U.S. Pat. No. 11,518,807, the disclosure of which is hereby incorporated by reference in its entirety, as well as any functionally equivalent variants of the modified Fc regions set forth therein. Other modified Fc domains and Fc modifications that can be used in the context of the present disclosure include any of the modifications as set forth in U.S. Pat. Nos. 8,697,396, 10,988,537, US 2014/0171623, US 2014/0134162, US 2014/0243504, and WO 2014/043361, the disclosures of each of which are incorporated by reference herein.

[0325] All possible combinations of the foregoing Fc domain mutations, and other mutations within the antibody variable domains disclosed herein, are contemplated within the scope of the present disclosure.

### VI. Polynucleotides, Vectors, and Host Cells

[0326] In another aspect, the present disclosure provides nucleic acid molecules comprising one or more polynucleotide sequences encoding the antigen-binding molecules disclosed herein, as well as vectors (e.g., expression vectors) encoding such polynucleotide sequences and host cells into which such vectors have been introduced.

[0327] Polynucleotides, as disclosed herein, may encode all or a portion of an antigen-binding molecule, antibody, or antigen-binding fragment as disclosed throughout the present disclosure. In some cases, a single polynucleotide may encode both a HCVR and a LCVR (e.g., defined with reference to the CDRs contained within the respective amino acid sequence-defined HCVR and LCVR, defined with reference to the amino acid sequences of the CDRs of the HCVR and LCVR, respectively, or defined with reference to the amino acid sequences of the HCVR and LCVR, respectively) of an antibody or antigen-binding fragment, or the HCVR and LCVR may be encoded by separate polynucleotides (i.e., a pair of polynucleotides). In the latter case, in which the HCVR and LCVR are encoded by separate polynucleotides, the polynucleotides may be combined in a single vector or may be contained in separate vectors (i.e., a pair of vectors). In any case, a host cell used to express the polynucleotide(s) or vector(s) may contain the full complement of component parts to generate the antibody or antigen-binding fragment thereof. For example, a host cell may comprise separate vectors, each encoding a HCVR and a LCVR, respectively, of an antibody or antigen-binding fragment thereof as discussed above or herein. Similarly, the polynucleotide or polynucleotides, and the vector or vectors, may be used to express the full-length heavy chain and full-length light chain of an antibody as discussed above or herein. For example, a host cell may comprise a single vector with polynucleotides encoding both a heavy chain and a light chain of an antibody, or the host cell may comprise separate vectors with polynucleotides encoding, respectively, a heavy chain and a light chain of an antibody as disclosed above or herein.

[0328] In some embodiments, the nucleic acid molecule comprises one or more polynucleotide sequences encoding an antigen-binding molecule disclosed in Table 1.

[0329] In some embodiments, the nucleic acid molecule comprises a polynucleotide sequence that encodes an anti-BCMA HCVR comprising the HCDR1, HCDR2, and HCDR3 of SEQ ID NOS: 4, 6, and 8, respectively. In some embodiments, the nucleic acid molecule comprises a polynucleotide sequence that encodes an anti-BCMA HCVR comprising or consisting of the sequence of SEQ ID NO: 2. In some embodiments, the nucleic acid molecule comprises a polynucleotide sequence of SEQ ID NO: 1, or a polynucleotide sequence having at least 70% sequence identity, e.g., at least 75%, at least 80%, at least 85%, at least 86%, at least 87%, at least 88%, at least 89%, at least 90%, at least 91%, at least 92%, at least 93%, at least 94%, at least 95%, at least 96%, at least 97%, at least 98% or at least 99% sequence identity, to SEQ ID NO: 1.

[0330] In some embodiments, the nucleic acid molecule comprises a polynucleotide sequence that encodes an anti-CD3 HCVR comprising the HCDR1, HCDR2, and HCDR3 of SEQ ID NOS: 28, 30, and 32, respectively; or of SEQ ID NOS: 36, 38, and 40, respectively. In some embodiments, the nucleic acid molecule comprises a polynucleotide sequence that encodes an anti-CD3 HCVR comprising or consisting of the sequence of SEQ ID NO: 26 or SEQ ID NO: 34. In some embodiments, the nucleic acid molecule comprises a polynucleotide sequence of SEQ ID NO: 25 or 33, or a polynucleotide sequence having at least 70% sequence identity, e.g., at least 75%, at least 80%, at least 85%, at least 86%, at least 87%, at least 88%, at least 89%, at least 90%, at least 91%, at least 92%, at least 93%, at least 94%, at least 95%, at least 96%, at least 97%, at least 98% or at least 99% sequence identity, to SEQ ID NO: 25 or 33.

[0331] In some embodiments, the nucleic acid molecule comprises a polynucleotide sequence that encodes an LCVR comprising an LCDR1 comprising or consisting of the amino acid sequence of SEQ ID NO: 20, an LCDR2 comprising the amino acid sequence AAS (SEQ ID NO: 22), and an LCDR3 comprising the amino acid sequence of SEQ ID NO: 24. In some embodiments, the nucleic acid molecule comprises a polynucleotide sequence that encodes an LCVR comprising or consisting of the sequence of SEQ ID NO: 18. In some embodiments, the nucleic acid molecule comprises the polynucleotide sequence of SEQ ID NO: 17, or a polynucleotide sequence having at least 70% sequence identity, e.g., at least 75%, at least 80%, at least 85%, at least 86%, at least 87%, at least 88%, at least 89%, at least 90%, at least 91%, at least 92%, at least 93%, at least 94%, at least 95%, at least 96%, at least 97%, at least 98% or at least 99% sequence identity, to SEQ ID NO: 17.

[0332] In some embodiments, compositions are provided comprising one or more nucleic acid molecules as disclosed herein. For example, in some embodiments, a composition comprises a first nucleic acid molecule comprising a polynucleotide sequence encoding an HCVR and/or LCVR of a first antigen-binding domain that binds BCMA, and a second nucleic acid molecule comprising a polynucleotide sequence encoding an HCVR and/or LCVR of a second antigen-binding domain that binds CD3. In some embodiments, a composition comprises a first nucleic acid molecule comprising a polynucleotide sequence encoding an HCVR of a first antigen-binding domain that binds BCMA, a second nucleic acid molecule comprising a polynucleotide sequence encoding an LCVR of a first antigen-binding domain that binds BCMA, a third nucleic acid molecule comprising a polynucleotide sequence encoding an HCVR of a second antigen-binding domain that binds CD3, and a fourth nucleic acid molecule comprising a polynucleotide sequence encoding an LCVR of a second antigen-binding domain that binds CD3. In some embodiments, an anti-BCMA HCVR comprises the HCDR1, HCDR2, and HCDR3 of SEQ ID NOS: 4, 6, and 8, respectively. In some embodiments, an anti-BCMA LCVR comprises LCDR1, LCDR2, and LCDR3 of SEQ ID NOS: 20, 22, and 24, respectively. In some embodiments, an anti-CD3 HCVR comprises the HCDR1, HCDR2, and HCDR3 of SEQ ID NOS: 28, 30, and 32, respectively; or the HCDR1, HCDR2, and HCDR3 of SEQ ID NOS: 36, 38, and 40, respectively. In some embodiments, an anti-CD3 LCVR comprises the LCDR1, LCDR2, and LCDR3 of SEQ ID NOS: 20, 22, and 24, respectively.

[0333] In one embodiment, the present disclosure provides a nucleic acid molecule or nucleic acid molecules that comprise a nucleotide sequence encoding the HCVR sequence of the anti-BCMA antigen-binding domain comprising SEQ ID NO: 2, a nucleotide sequence encoding the HCVR sequence of the anti-CD3 antigen-binding domain comprising SEQ ID NO: 26, and a nucleotide sequence encoding the LCVR sequence comprising SEQ ID NO: 18.

[0334] In one embodiment, the present disclosure provides a nucleic acid molecule or nucleic acid molecules that comprise a nucleotide sequence encoding the HCVR sequence of the anti-BCMA antigen-binding domain comprising SEQ ID NO: 2, a nucleotide sequence encoding the HCVR sequence of the anti-CD3 antigen-binding domain comprising SEQ ID NO: 34, and a nucleotide sequence encoding the LCVR sequence comprising SEQ ID NO: 18.

[0335] In another aspect, the present disclosure also provides recombinant expression vectors carrying one or more nucleic acid molecules as disclosed herein, as well as host cells into which such vectors have been introduced. In some embodiments, the host cell is a prokaryotic cell (e.g., E. coli). In some embodiments, the host cell is a eukaryotic cell, such as a non-human mammalian cell (e.g., a Chinese Hamster Ovary (CHO) cell). Also provided herein are methods of producing the antigen-binding molecules of the disclosure by culturing the host cells under conditions permitting production of the antigen-binding molecules, and recovering the antigen-binding molecules so produced.

[0336] In some embodiments, the nucleic acid molecule comprises one or more polynucleotide sequences encoding an antigen-binding molecule disclosed in Table 2.

[0337] In some embodiments, the nucleic acid molecule comprises a polynucleotide sequence that encodes an anti-CD20 HCVR comprising the HCDR1, HCDR2, and HCDR3 of SEQ ID NOs: 47, 48, and 49, respectively. In some embodiments, the nucleic acid molecule comprises a polynucleotide sequence that encodes an anti-CD20 HCVR comprising or consisting of the sequence of SEQ ID NO: 44.

[0338] In some embodiments, the nucleic acid molecule comprises a polynucleotide sequence that encodes an anti-CD3 HCVR comprising the HCDR1, HCDR2, and HCDR3 of SEQ ID NOs: 53, 54, and 55, respectively. In some embodiments, the nucleic acid molecule comprises a polynucleotide sequence that encodes an anti-CD3 HCVR comprising or consisting of the sequence of SEQ ID NO: 46.

[0339] In some embodiments, the nucleic acid molecule comprises a polynucleotide sequence that encodes an LCVR comprising the LCDR1, LCDR2, and LCDR3 of SEQ ID NOs: 50, 51, and 52, respectively. In some embodiments, the nucleic acid molecule comprises a polynucleotide sequence that encodes an LCVR comprising or consisting of the sequence of SEQ ID NO: 45.

[0340] In some embodiments, compositions are provided comprising one or more nucleic acid molecules as disclosed herein. For example, in some embodiments, a composition comprises a first nucleic acid molecule comprising a polynucleotide sequence encoding an HCVR and/or LCVR of a first antigen-binding domain that binds CD20, and a second nucleic acid molecule comprising a polynucleotide sequence encoding an HCVR and/or LCVR of a second antigen-binding domain that binds CD3. In some embodiments, a composition comprises a first nucleic acid molecule comprising a polynucleotide sequence encoding an HCVR of a first antigen-binding domain that binds CD20, a second nucleic acid molecule comprising a polynucleotide sequence encoding an LCVR of a first antigen-binding domain that binds CD20, a third nucleic acid molecule comprising a polynucleotide sequence encoding an HCVR of a second antigen-binding domain that binds CD3, and a fourth nucleic acid molecule comprising a polynucleotide sequence encoding an LCVR of a second antigen-binding domain that binds CD3. In some embodiments, an anti-CD20 HCVR comprises the HCDR1, HCDR2, and HCDR3 of SEQ ID NOs: 47, 48, and 49, respectively. In some embodiments, an anti-CD20 LCVR comprises LCDR1, LCDR2, and LCDR3 of SEQ ID NOs: 50, 51, and 52, respectively. In some embodiments, an anti-CD3 HCVR comprises the HCDR1, HCDR2, and HCDR3 of SEQ ID NOs: 53, 54, and 55, respectively. In some embodiments, an anti-CD3 LCVR comprises the LCDR1, LCDR2, and LCDR3 of SEQ ID NOs: 50, 51, and 52, respectively.

[0341] In one embodiment, the present disclosure provides a nucleic acid molecule or nucleic acid molecules that comprise a nucleotide sequence encoding the HCVR sequence of the anti-CD20 antigen-binding domain comprising SEQ ID NO: 44, a nucleotide sequence encoding the HCVR sequence of the anti-CD3 antigen-binding domain comprising SEQ ID NO: 46, and a nucleotide sequence encoding the LCVR sequence comprising SEQ ID NO: 45.

[0342] In another aspect, the present disclosure also provides recombinant expression vectors carrying one or more nucleic acid molecules as disclosed herein, as well as host cells into which such vectors have been introduced. In some embodiments, the host cell is a prokaryotic cell (e.g., E. coli). In some embodiments, the host cell is a eukaryotic cell, such as a non-human mammalian cell (e.g., a Chinese Hamster Ovary (CHO) cell). Also provided herein are methods of producing the antigen-binding molecules of the disclosure by culturing the host cells under conditions permitting production of the antigen-binding molecules, and recovering the antigen-binding molecules so produced.

### VI. Characterization of BCMA×CD3 Bispecific Antigen-Binding Molecules and CD20×CD3 Bispecific Antigen-Binding Molecules

[0343] The present disclosure includes bispecific antigen-binding molecules (e.g., bispecific antibodies) and functional fragments thereof that bind to BCMA and CD3 (e.g., human BCMA and CD3) with high affinity.

[0344] In some embodiments, the present disclosure includes bispecific antigen-binding molecules (e.g., bispecific antibodies as disclosed herein) that bind BCMA and CD3 (e.g., at 25° C. or 37° C.) with a K_{D} of less than about 75 nM, e.g., as measured by surface plasmon resonance or a substantially similar assay. In certain embodiments, the antigen-binding molecules of the present disclosure bind human BCMA and CD3 with a K_{D} of less than about 75 nM, less than about 70 nM, less than about 60 nM, less than about 50 nM, less than about 40 nM, less than about 30 nM, less than about 25 nM, less than about 20 nM, less than about 15 nM, less than about 10 nM, less than about 5 nM, less than about 1 nM, less than about 500 pM, less than about 400 pM, less than about 300 pM, less than about 200 pM, less than about 100 pM, less than about 90 pM, less than about 80 pM, less than about 70 pM, less than about 60 pM, less than about 50 pM, less than about 40 pM, less than about 30 pM, less than about 20 pM, less than about 10 pM, less than about 5 pM, less than about 4 pM, less than about 2 pM, less than about 1 pM, less than about 0.5 pM, less than about 0.2 pM, less than about 0.1 pM, or less than about 0.05 pM, as measured by surface plasmon resonance or a substantially similar assay.

[0345] In some embodiments, the present disclosure includes bispecific antigen-binding molecules (e.g., bispecific antibodies as disclosed herein) that specifically interact (e.g., bind with) cells that express BCMA and/or CD3. The extent to which an antigen-binding molecule binds cells that express BCMA and/or CD3 can be assessed by flow cytometry. For example, in some embodiments, the present disclosure provides anti-BCMA×CD3 bispecific antibodies that specifically bind cells that express BCMA and/or CD3 on the cell surface (e.g., human plasma cells and/or T cells). In some embodiments, the disclosure provides anti-BCMA×CD3 bispecific antibodies that bind BCMA and/or CD3-expressing cells or cell lines with an EC₅₀ value of about 10 nM or less, e.g., from about 0.5 nM to about 10 nM, e.g., an EC₅₀ value of about 1 nM, about 1.5 nM, about 2 nM, about 2.5 nM, about 3 nM, about 3.5 nM, about 4 nM, about 4.5 nM, about 5 nM, about 5.5 nM, about 6 nM, about 6.5 nM, about 7 nM, about 7.5 nM, about 8 nM, about 8.5 nM, about 9 nM, about 9.5 nM, or about 10 nM, e.g., as determined by flow cytometry or a substantially similar assay.

[0346] The present disclosure includes bispecific antigen-binding molecules (e.g., bispecific antibodies) and functional fragments thereof that bind to CD20 and CD3 (e.g., human CD20 and CD3) with high affinity.

[0347] In some embodiments, the present disclosure includes bispecific antigen-binding molecules (e.g., bispecific antibodies as disclosed herein) that specifically interact (e.g., bind with) cells that express CD20 and/or CD3. The extent to which an antigen-binding molecule binds cells that express CD20 and/or CD3 can be assessed by an in vitro binding assay. For example, in some embodiments, the present disclosure provides anti-CD20×CD3 bispecific antibodies that specifically bind cells that express CD20 and/or CD3 on the cell surface (e.g., human B cells and/or T cells). In certain embodiments, the anti-CD20×CD3 bispecific antibodies bind Jurkat cells and Raji cells with an EC₅₀ value of less than about 60 nM, as measured by an in vitro binding assay. In certain embodiments, the anti-CD20×CD3 bispecific antibodies bind CD3 or CD20 on the surface of a Jurkat or Raji cell, respectively, with an EC₅₀ value of less than about 1000 mM, less than about 500 nM, less than about 200 nM, less than about 100 nM, less than about 75 nM, less than about 70 nM, less than about 65 nM, less than about 60 nM, less than about 50 nM, less than about 40 nM, less than about 30 nM, less than about 25 nM, less than about 10 nM, less than about 5 nM, less than about 2 nM, less than about 1 nM, less than about 500 pM, less than about 100 pM, less than about 10 pM, or less than about 1 pM as measured by an in vitro binding assay.

### VIII. Epitope Mapping and Related Technologies

[0348] In some embodiments, the epitope on BCMA and/or CD20 and/or CD3 to which the antigen-binding molecules of the present disclosure bind (e.g., an epitope of BCMA or CD20 to which a first antigen-binding domain (D1) binds, or an epitope of CD3 to which a second antigen-binding domain (D2) binds) may consist of a single contiguous sequence of 3 or more (e.g., 3, 4, 5, 6, 7, 8, 9, 10, 11, 12, 13, 14, 15, 16, 17, 18, 19, 20 or more) amino acids of a BCMA or CD20 or CD3 protein. Alternatively, the epitope may consist of a plurality of non-contiguous amino acids (or amino acid sequences) of a BCMA or CD20 or CD3 protein. The antibodies of the invention may interact with amino acids contained within a single CD3 chain (e.g., CD3-epsilon, CD3-delta or CD3-gamma), or may interact with amino acids on two or more different CD3 chains. The term “epitope,” as used herein, refers to an antigenic determinant that interacts with a specific antigen binding site in the variable region of an antibody molecule known as a paratope. A single antigen may have more than one epitope. Thus, different antibodies may bind to different areas on an antigen and may have different biological effects. Epitopes may be either conformational or linear. A conformational epitope is produced by spatially juxtaposed amino acids from different segments of the linear polypeptide chain. A linear epitope is one produced by adjacent amino acid residues in a polypeptide chain. In certain circumstance, an epitope may include moieties of saccharides, phosphoryl groups, or sulfonyl groups on the antigen.

[0349] Various techniques known to persons of ordinary skill in the art can be used to determine whether an antigen-binding domain of an antibody “interacts with one or more amino acids” within a polypeptide or protein. Exemplary techniques that can be used to determine an epitope or binding domain of a particular antibody or antigen-binding domain include, e.g., routine crossblocking assay such as that described in Antibodies, Harlow and Lane (Cold Spring Harbor Press, Cold Spring Harb., NY), point mutagenesis (e.g., alanine scanning mutagenesis, arginine scanning mutagenesis, etc.), peptide blots analysis (Reineke, 2004, Methods Mol Biol 248:443-463), protease protection, and peptide cleavage analysis. In addition, methods such as epitope excision, epitope extraction and chemical modification of antigens can be employed (Tomer, 2000, Protein Science 9:487-496). Another method that can be used to identify the amino acids within a polypeptide with which an antibody interacts is hydrogen/deuterium exchange detected by mass spectrometry. In general terms, the hydrogen/deuterium exchange method involves deuterium-labeling the protein of interest, followed by binding the antibody to the deuterium-labeled protein. Next, the protein/antibody complex is transferred to water to allow hydrogen-deuterium exchange to occur at all residues except for the residues protected by the antibody (which remain deuterium-labeled). After dissociation of the antibody, the target protein is subjected to protease cleavage and mass spectrometry analysis, thereby revealing the deuterium-labeled residues which correspond to the specific amino acids with which the antibody interacts. See, e.g., Ehring (1999) Analytical Biochemistry 267(2):252-259; Engen and Smith (2001) Anal. Chem. 73:256A-265A. X-ray crystal structure analysis can also be used to identify the amino acids within a polypeptide with which an antibody interacts.

[0350] The present disclosure also includes antigen-binding molecules (e.g., antibodies or antigen-binding domains thereof) that bind to the same epitope as, or competes for binding with, a bispecific BCMA×CD3 antigen-binding molecule or a bispecific CD20×CD3 antigen-binding molecule described herein. One skilled in the art can determine whether or not a particular antigen-binding molecule (e.g., antibody) or antigen-binding domain thereof binds to the same epitope as, or competes for binding with, a reference antigen-binding molecule of the present disclosure by using routine methods known in the art. For example, to determine if a test antibody binds to the same epitope on BCMA and/or CD20 and/or CD3 as a reference bispecific antigen-binding molecule of the present disclosure, the reference bispecific molecule is first allowed to bind to a BCMA and/or CD20 and/or CD3 protein. Next, the ability of a test antibody to bind to the BCMA and/or CD20 and/or CD3 molecule is assessed. If the test antibody is able to bind to BCMA and/or CD20 and/or CD3 following saturation binding with the reference bispecific antigen-binding molecule, it can be concluded that the test antibody binds to a different epitope of BCMA and/or CD20 and/or CD3 than the reference bispecific antigen-binding molecule. On the other hand, if the test antibody is not able to bind to the BCMA and/or CD20 and/or CD3 molecule following saturation binding with the reference bispecific antigen-binding molecule, then the test antibody may bind to the same epitope of BCMA and/or CD20 and/or CD3 as the epitope bound by the reference bispecific antigen-binding molecule of the disclosure. Additional routine experimentation (e.g., peptide mutation and binding analyses) can then be carried out to confirm whether the observed lack of binding of the test antibody is in fact due to binding to the same epitope as the reference bispecific antigen-binding molecule or if steric blocking (or another phenomenon) is responsible for the lack of observed binding. Experiments of this sort can be performed using ELISA, radioimmunoassay (RIA), Biacore, flow cytometry or any other quantitative or qualitative antibody-binding assay available in the art. In accordance with certain embodiments of the present disclosure, two antigen-binding proteins bind to the same (or overlapping) epitope if, e.g., a 1-, 2-, 5-, 10-, 20- or 100-fold excess of one antigen-binding protein inhibits binding of the other by at least 50% but preferably 75%, 90% or even 99% as measured in a competitive binding assay (see, e.g., Junghans et al., Cancer Res. 1990:50:1495-1502). Alternatively, two antigen-binding proteins are deemed to bind to the same epitope if essentially all amino acid mutations in the antigen that reduce or eliminate binding of one antigen-binding protein reduce or eliminate binding of the other. Two antigen-binding proteins are deemed to have “overlapping epitopes” if only a subset of the amino acid mutations that reduce or eliminate binding of one antigen-binding protein reduce or eliminate binding of the other.

[0351] To determine if an antibody or antigen-binding domain thereof competes for binding with a reference antigen-binding molecule, the above-described binding methodology is performed in two orientations: In a first orientation, the reference antigen-binding molecule is allowed to bind to a BCMA and/or CD20 and/or CD3 protein under saturating conditions followed by assessment of binding of the test antibody to the BCMA and/or CD20 and/or CD3 molecule. In a second orientation, the test antibody is allowed to bind to a BCMA and/or CD20 and/or CD3 molecule under saturating conditions followed by assessment of binding of the reference antigen-binding molecule to the BCMA and/or CD20 and/or CD3 molecule. If, in both orientations, only the first (saturating) antigen-binding molecule is capable of binding to the BCMA and/or CD20 and/or CD3 molecule, then it is concluded that the test antibody and the reference antigen-binding molecule compete for binding to BCMA and/or CD20 and/or CD3. As will be appreciated by a person of ordinary skill in the art, an antibody that competes for binding with a reference antigen-binding molecule may not necessarily bind to the same epitope as the reference antibody, but may sterically block binding of the reference antibody by binding an overlapping or adjacent epitope.

### IX. Preparation of Antigen-Binding Domains and Constructions of Multispecific Antigen-Binding Molecules

[0352] Antigen-binding domains specific for particular antigens can be prepared by any antibody generating technology known in the art. Once obtained, two different antigen-binding domains can be appropriately arranged relative to one another to produce a bispecific antigen-binding molecule of the present disclosure using routine methods. A discussion of exemplary bispecific antibody formats that can be used to construct the bispecific antigen-binding molecules of the present disclosure is provided elsewhere herein. In certain embodiments, one or more of the individual components (e.g., heavy, and light chains) of the multispecific antigen-binding molecules are derived from chimeric, humanized or fully human antibodies. Methods for making such antibodies are well known in the art. For example, one or more of the heavy and/or light chains of the bispecific antigen-binding molecules of the present disclosure can be prepared using VELOCIMMUNE™ technology. Using VELOCIMMUNE™ technology (or any other human antibody generating technology), high affinity chimeric antibodies to a particular antigen (e.g., BCMA or CD20 or CD3) are initially isolated having a human variable region and a mouse constant region. The antibodies are characterized and selected for desirable characteristics, including affinity, selectivity, epitope, etc. The mouse constant regions are replaced with a desired human constant region to generate fully human heavy and/or light chains that can be incorporated into the bispecific antigen-binding molecules.

[0353] In some embodiments, genetically engineered animals may be used to make human bispecific antigen binding molecules. For example, a genetically modified mouse can be used which is incapable of rearranging and expressing an endogenous mouse immunoglobulin light chain variable sequence, wherein the mouse expresses only one or two human light chain variable domains encoded by human immunoglobulin sequences operably linked to the mouse kappa constant gene at the endogenous mouse kappa locus. Such genetically modified mice can be used to produce fully human bispecific antigen-binding molecules comprising two different heavy chains that associate with an identical light chain that comprises a variable domain derived from one of two different human light chain variable region gene segments. See, e.g., US 2011/0195454, the entire contents of which are incorporated herein by reference, for a detailed discussion of such engineered mice and the use thereof to produce bispecific antigen-binding molecules. As used herein, “fully human” refers to an antigen-binding molecule, e.g., an antibody, or antigen-binding fragment or immunoglobulin domain thereof, comprising an amino acid sequence encoded by a DNA derived from a human sequence over the entire length of each polypeptide of the antigen-binding molecule, antibody, antigen-binding fragment, or immunoglobulin domain thereof. In some instances, the fully human sequence is derived from a protein endogenous to a human. In other instances, the fully human protein or protein sequence comprises a chimeric sequence wherein each component sequence is derived from human sequence. While not being bound by any one theory, chimeric proteins or chimeric sequences are generally designed to minimize the creation of immunogenic epitopes in the junctions of component sequences, e.g., compared to any wild-type human immunoglobulin regions or domains.

### X. Bioequivalents

[0354] The present disclosure encompasses antigen-binding molecules having amino acid sequences that vary from those of the described antibodies but that retain the ability to bind BCMA and/or CD20 and/or CD3. Such variant molecules comprise one or more additions, deletions, or substitutions of amino acids when compared to the parent sequence, but exhibit biological activity that is essentially equivalent to that of the described antigen-binding molecules. Likewise, the nucleic acid sequences encoding the antigen-binding molecules of the present disclosure encompass sequences that comprise one or more additions, deletions, or substitutions of nucleotides when compared to the disclosed sequence, but that encode an antigen binding molecule that is essentially bioequivalent to the antigen-binding molecules disclosed herein.

[0355] The present disclosure includes antigen-binding molecules that are bioequivalent to any of the exemplary antigen-binding molecules set forth herein. Two antigen-binding proteins, e.g., bispecific antibodies, are considered bioequivalent if, for example, they are pharmaceutical equivalents or pharmaceutical alternatives whose rate and extent of absorption do not show a significant difference when administered at the same molar dose under similar experimental conditions, either single dose or multiple doses. Some antibodies will be considered equivalents or pharmaceutical alternatives if they are equivalent in the extent of their absorption but not in their rate of absorption and yet may be considered bioequivalent because such differences in the rate of absorption are intentional and are reflected in the labeling, are not essential to the attainment of effective body drug concentrations on, e.g., chronic use, and are considered medically insignificant for the particular drug product studied.

[0356] In one embodiment, two antigen-binding proteins are bioequivalent if there are no clinically meaningful differences in their safety, purity, and potency.

[0357] In one embodiment, two antigen-binding proteins are bioequivalent if a patient can be switched one or more times between the first antigen-binding protein (e.g., reference product) and the second antigen-binding protein (e.g., biological product) without an expected increase in the risk of adverse effects, including a clinically significant change in immunogenicity, or diminished effectiveness, as compared to continued therapy without such switching.

[0358] In one embodiment, two antigen-binding proteins are bioequivalent if they both act by a common mechanism or mechanisms of action for the condition or conditions of use, to the extent that such mechanisms are known.

[0359] Bioequivalence may be demonstrated by in vivo and in vitro methods. Non-limiting examples of bioequivalence measures include, e.g., (a) an in vivo test in humans or other mammals, in which the concentration of the antibody or its metabolites is measured in blood, plasma, serum, or other biological fluid as a function of time; (b) an in vitro test that has been correlated with and is reasonably predictive of human in vivo bioavailability data; (c) an in vivo test in humans or other mammals in which the appropriate acute pharmacological effect of the antibody (or its target) is measured as a function of time; and (d) in a well-controlled clinical trial that establishes safety, efficacy, or bioavailability or bioequivalence of an antibody.

[0360] Bioequivalent variants of the exemplary bispecific antigen-binding molecules set forth herein may be constructed by, for example, making various substitutions of residues or sequences or deleting terminal or internal residues or sequences not needed for biological activity. For example, cysteine residues not essential for biological activity can be deleted or replaced with other amino acids to prevent formation of unnecessary or incorrect intramolecular disulfide bridges upon renaturation. In other embodiments, bioequivalent antibodies may include the exemplary bispecific antigen-binding molecules set forth herein comprising amino acid changes which modify the glycosylation characteristics of the antibodies, e.g., mutations which eliminate or remove glycosylation.

### XI. Immunoglobulin Depleting Agents

[0361] In various aspects, the present disclosure provides immunoglobulin depleting agents, e.g., which may be combined with or administered in combination with plasma cell depleting agents (e.g., an anti-BCMA×CD3 bispecific antibody, or a functional fragment thereof or B cell depleting agents (e.g., an anti-CD20×CD3 bispecific antibody, or a functional fragment thereof) described herein. In some embodiments, the immunoglobulin depleting agent may be administered in combination with a plasma cell depleting agent, a B cell depleting agent, plasmapheresis, therapeutic plasma exchange, immunoadsorption, and/or an immunogen (e.g., nucleic acid construct, nuclease agent or CRISPR/Cas system, e.g., in an immunogenic delivery vehicle) (e.g., an immunogenic delivery vehicle such as, e.g., AAV) disclosed herein. Suitable combinations comprising a plasma cell depleting agent are described in more detail elsewhere herein. In some embodiments, an immunoglobulin depleting agent may be useful for, e.g., accelerating IgG clearance.

[0362] In some embodiments, an immunoglobulin depleting agent is capable of accelerating IgG serum clearance.

[0363] In some embodiments, an immunoglobulin depleting agent may comprise a neonatal Fc receptor (FcRn) blocker such as, but not limited to, efgartigimod alfa. The mechanistic concept of FcRn-targeting therapeutics is to accelerate IgG catabolism by blocking the FcRn-mediated intracellular IgG recycling pathway, thereby reducing overall plasma IgG levels. FcRn can participate in the maintenance of IgG levels by salvaging IgG from lysosomal degradation, thereby prolonging the half-life of IgG. In some embodiments, FcRn blockers can compete with IgG for binding to FcRn. Due to their higher affinity for FcRn, FcRn blockers can prevent IgG from binding to FcRn and, instead, IgG is transported to the lysosome and degraded, thereby leading to decreased circulating levels of IgG.

[0364] In some embodiments, an FcRn blocker can include Efgartigimod (ARGX-113), Rozanolixizumab (UCB7665), Batoclimab (RVT-1401), IMVT-1402, Nipocalimab (M281), Orilanolimab (SYNT01), or any combination thereof. See, e.g., Zuercher et al. (2019) Autoimmun. Rev. 18(10):102366.

[0365] In some embodiments, an immunoglobulin depleting agent may comprise an IgG degrading enzyme such as IdeS (imlifidase), IdeZ, or IdeXork. IdeS (imlifidase) is an endopeptidase derived from Streptococcus pyogenes which has specificity for human IgG, and when infused intravenously results in rapid cleavage of IgG. IdeZ (immunoglobulin-degrading enzyme from Streptococcus equi subspecies zooepidemicus) is an engineered recombinant protease overexpressed in Escherichia coli. IdeZ specifically cleaves IgG molecules below the hinge region to yield F(ab′)2 and Fc fragments. IdeXork (Xork) is yet another example of an IgG protease. Additional non-limiting examples of IgG degrading enzymes include Imlifidase/IdeS/Fabricator, IdeZ, IceM, IceMG, CYR-212, CYR-241, S-1117, HNSA-5487, and Xork. In some embodiments, an immunoglobulin depleting agent may facilitate IgG degradation via lysosomal destruction. A non-limiting example of an immunoglobulin depleting agent which may facilitate IgG degradation via lysosomal destruction is BHV-1300.

### XII. Plasmapheresis, Therapeutic Plasma Exchange, and Immunoadsorption

[0366] In various aspects, the methods disclosed herein can include plasmapheresis, therapeutic plasma exchange, or immunoadsorption. These can be combined, for example, with treatment with plasma cell depleting agents (e.g., an anti-BCMA×CD3 bispecific antibody, or a functional fragment thereof), B cell depleting agents (e.g., an anti-CD20×CD3 bispecific antibody, or a functional fragment thereof), and/or immunoglobulin depleting agents described herein. In some embodiments, the plasmapheresis, therapeutic plasma exchange, or immunoadsorption may be performed in combination with treatment with a plasma cell depleting agent, a B cell depleting agent, and/or an immunogen (e.g., nucleic acid construct, nuclease agent or CRISPR/Cas system, e.g., in an immunogenic delivery vehicle) disclosed herein. Suitable combinations comprising a plasma cell depleting agent are described in more detail elsewhere herein. Plasmapheresis, therapeutic plasma exchange, and immunoadsorption may be useful strategies for removal of AAV antibodies from patients' blood plasma.

[0367] Plasmapheresis is a process used to selectively remove blood components used to treat a variety of conditions including those caused by the acute overproduction of antibodies (e.g., autoimmunity, transplant rejection), in which removal of pathogenic immunoglobulins results in clinical benefit. Immunoadsorption is a selective therapeutic apheresis technique by which immunoglobulins are selectively removed from patients' plasma. The immunoadsorption can be, for example, total immunoglobulin immunoadsorption. See, e.g., Boedecker-Lips et al. (2023) J. Clin. Apher. 38(5):590-601. Alternatively, the immunoadsorption can be AAV capsid specific immunoadsorption. See, e.g., Bertin et al. (2020) Sci. Rep. 10:864.

### XIII. Combinations Comprising a Plasma Cell Depleting Agent

[0368] A plasma cell depleting agent (e.g., a BCMA×CD3 antigen-binding molecule) can be administered to a subject in need thereof either alone, or in combination with, a B cell depleting agent (e.g., a CD20×CD3 antigen-binding molecule), an immunoglobulin depleting agent (e.g., an FcRn blocker, such as Efgartigimod), and/or an immunogen. In some embodiments, the administration of the plasma cell depleting, the B cell depleting agent, the immunoglobulin depleting agent, and/or the immunogen can be further combined with plasmapheresis, therapeutic plasma exchange, and/or immunoadsorption. As used herein, the term “in combination with,” e.g., a BCMA×CD3 bispecific antigen-binding molecule (or other immunomodulator or immunogen, etc.) means that additional component(s) may be administered prior to, concurrent with, or after the administration of BCMA×CD3 bispecific antigen-binding molecule (or other immunomodulator or immunogen, etc.) molecule (or other immunomodulator or immunogen, etc.). The different components of the combination can be formulated into a single composition, e.g., for simultaneous delivery, or formulated separately into two or more compositions (e.g., a kit including each component, for example, wherein the further agent is in a separate formulation).

[0369] For example, a plasma cell depleting agent (e.g., a BCMA×CD3 antigen-binding molecule) can be administered to a subject in need thereof either alone, or in combination with, a B cell depleting agent (e.g., a CD20×CD3 antigen-binding molecule) and/or an immunoglobulin depleting agent (e.g., an FcRn blocker, such as Efgartigimod). In some embodiments, the B cell depleting agent is administered before, at the same time as, or after the plasma cell depleting agent. In some embodiments, the immunoglobulin depleting agent is administered after the plasma cell depleting agent. In some embodiments, the B cell depleting agent is administered prior to and after the nucleic acid construct. In some embodiments, the immunoglobulin depleting agent is administered prior to and after the nucleic acid construct. In some embodiments, the immunoglobulin depleting agent is administered after an initial dose of the plasma cell depleting agent, or wherein the immunoglobulin depleting agent is administered after an initial dose of the plasma cell depleting agent and after an initial dose of the B cell depleting agent.

[0370] In one example, a plasma cell depleting agent (e.g., a BCMA×CD3 antigen-binding molecule) is administered to a subject in need thereof in combination with a B cell depleting agent (e.g., a CD20×CD3 antigen-binding molecule).

[0371] In another example, a plasma cell depleting agent (e.g., a BCMA×CD3 antigen-binding molecule) is administered to a subject in need thereof in combination with an immunoglobulin depleting agent (e.g., an FcRn blocker, such as Efgartigimod). In some embodiments, the immunoglobulin depleting agent comprises an FcRn blocker. In some embodiments, the immunoglobulin depleting agent comprises an IgG degrading enzyme.

[0372] In some embodiments, the combination of the plasma cell depleting agent and the immunoglobulin depleting agent, when administered in further combination with an immunogen (e.g., an immunogenic delivery vehicle such as, e.g., AAV) to a subject in need thereof, decreases a level of an anti-immunogen antibody titer (e.g., an anti-AAV antibody titer) in the subject (e.g., such as can be measured in a serum sample isolated from the subject). In some embodiments, the level of the anti-immunogen antibody titer is decreased by about 1-fold to about 20-fold, about 2-fold to about 15-fold, about 4-fold to about 10-fold, about 3-fold to about 18-fold, about 5-fold to about 12-fold, or about 6-fold to about 8-fold, as compared to the level of the anti-immunogen antibody titer in a subject administered the immunogen alone. In some embodiments, the anti-immunogen antibody titer is decreased by about 1-fold, about 2-fold, about 3-fold, about 4-fold, about 5-fold, about 6-fold, about 7-fold, about 8-fold, about 9-fold, about 10-fold, about 11-fold, about 12-fold, about 13-fold, about 14-fold, about 15-fold, about 16-fold, about 17-fold, about 18-fold, about 19-fold, or about 20-fold, or more. In some embodiments, the anti-immunogen antibody titer is decreased by about 20-fold.

[0373] In another example, a plasma cell depleting agent (e.g., a BCMA×CD3 antigen-binding molecule) is administered to a subject in need thereof in combination with a B cell depleting agent (e.g., a CD20×CD3 antigen-binding molecule) and an immunoglobulin depleting agent (e.g., an FcRn blocker, such as Efgartigimod). In some embodiments, the immunoglobulin depleting agent comprises an FcRn blocker. In some embodiments, the immunoglobulin depleting agent comprises an IgG degrading enzyme.

[0374] In some embodiments, the combination of the plasma cell-depleting agent, the B cell depleting agent, and the immunoglobulin-depleting agent, when administered in further combination with an immunogen (e.g., an immunogenic delivery vehicle such as, e.g., AAV) to a subject in need thereof, decreases the level of an anti-immunogen antibody titer (e.g., an anti-AAV antibody titer) in the subject (e.g., such as can be measured in a serum sample isolated from the subject). In some embodiments, the level of the anti-immunogen antibody titer may be decreased by about 1-fold to about 20-fold, about 2-fold to about 15-fold, about 4-fold to about 10-fold, about 3-fold to about 18-fold, about 5-fold to about 12-fold, about 6-fold to about 8-fold, about 10-fold to about 30-fold, about 20-fold to about 50-fold, about 30-fold to about 70-fold, about 40-fold to about 90-fold, or about 50-fold to about 100-fold, as compared to the level of the anti-immunogen antibody titer in a subject administered the immunogen alone. In some embodiments, the anti-immunogen antibody titer is decreased by about 1-fold, about 2-fold, about 3-fold, about 4-fold, about 5-fold, about 6-fold, about 7-fold, about 8-fold, about 9-fold, about 10-fold, about 11-fold, about 12-fold, about 13-fold, about 14-fold, about 15-fold, about 16-fold, about 17-fold, about 18-fold, about 19-fold, about 20-fold, about 25-fold, about 30-fold, about 35-fold, about 40-fold, about 45-fold, about 50-fold, about 55-fold, about 60-fold, about 65-fold, about 70-fold, about 75-fold, about 80-fold, about 85-fold, about 90-fold, about 95-fold, or about 100-fold, or more. In some embodiments, the anti-immunogen antibody titer is decreased by about 100-fold.

[0375] In another example, a plasma cell depleting agent (e.g., a BCMA×CD3 antigen-binding molecule) is administered to a subject in need thereof in combination with plasmapheresis, therapeutic plasma exchange, or immunoadsorption.

[0376] In another example, a plasma cell depleting agent (e.g., a BCMA×CD3 antigen-binding molecule) is administered to a subject in need thereof in combination with plasmapheresis, therapeutic plasma exchange, or immunoadsorption and a B cell depleting agent (e.g., a CD20×CD3 antigen-binding molecule).

[0377] In another example, a plasma cell depleting agent (e.g., a BCMA×CD3 antigen-binding molecule) is administered to a subject in need thereof in combination with plasmapheresis, therapeutic plasma exchange, or immunoadsorption and an immunoglobulin depleting agent (e.g., an FcRn blocker, such as Efgartigimod). In some embodiments, the immunoglobulin depleting agent comprises an FcRn blocker. In some embodiments, the immunoglobulin depleting agent comprises an IgG degrading enzyme.

[0378] In another example, a plasma cell depleting agent (e.g., a BCMA×CD3 antigen-binding molecule) is administered to a subject in need thereof in combination with plasmapheresis, therapeutic plasma exchange, or immunoadsorption, a B cell depleting agent (e.g., a CD20×CD3 antigen-binding molecule), and an immunoglobulin depleting agent (e.g., an FcRn blocker, such as Efgartigimod). In some embodiments, the immunoglobulin depleting agent comprises an FcRn blocker. In some embodiments, the immunoglobulin depleting agent comprises an IgG degrading enzyme.

[0379] In some embodiments, the B cell depleting agent comprises two or more B cell depleting agents (e.g., an anti-CD19 antigen-binding molecule and an anti-CD20 antigen-binding molecule). In some embodiments, the immunoglobulin depleting agent comprises two or more immunoglobulin depleting agents (e.g., an FcRn blocker and an IgG degrading enzyme).

[0380] In embodiments in which a plasma cell depleting agent (e.g., a BCMA×CD3 antigen-binding molecule) is administered to a subject in combination with, a B cell depleting agent (e.g., a CD20×CD3 antigen-binding molecule) and/or an immunoglobulin depleting agent (e.g., an FcRn blocker, such as Efgartigimod) and/or plasmapheresis, therapeutic plasma exchange, or immunoadsorption, one or more or all treatments can occur together or one or more or all treatments can occur sequentially. For example, in some embodiments in which the plasma cell depleting agent (e.g., a BCMA×CD3 antigen-binding molecule) is administered to a subject in need thereof in combination with an IgG degrading enzyme, the plasma cell depleting agent can be administered to the subject first, followed by the IgG degrading enzyme. In another example, in embodiments where an immunoglobulin depleting agent (e.g., FcRn blocker) is administered together with plasmapheresis, therapeutic plasma exchange, or immunoadsorption, the plasmapheresis, therapeutic plasma exchange, or immunoadsorption can be first followed by administration of the immunoglobulin depleting agent (e.g., FcRn blocker).

### XIV. Pharmaceutical Compositions

[0381] In another aspect, the present disclosure provides pharmaceutical compositions comprising plasma cell depleting agents (e.g., long-lived plasma cell (LLPC) depleting agents such as anti-BCMA×CD3 bispecific antibodies, or functional fragments thereof), B cell depleting agents (e.g., anti-CD19 and anti-CD20 antibodies or a CD20×CD3 antigen-binding molecule (e.g., REGN1979), or functional fragments thereof), immunoglobulin depleting agents (e.g., neonatal Fc receptor (FcRn) blockers), and/or immunogens (e.g., nucleic acid construct, nuclease agent or CRISPR/Cas system, e.g., in an immunogenic delivery vehicle) (e.g., immunogenic delivery vehicles) disclosed herein, optionally comprising a pharmaceutically acceptable carrier and/or excipient. In one specific embodiment, a composition described herein comprises an immunogen and an anti-CD20×CD3 bispecific antibody, or a functional fragment thereof, and optionally, further comprises a pharmaceutically acceptable carrier and/or excipient. Suitable combinations comprising a plasma cell depleting agent are described in more detail elsewhere herein. The pharmaceutical compositions are formulated with one or more pharmaceutically acceptable vehicle, carriers, and/or excipients. Various pharmaceutically acceptable carriers and excipients are well-known in the art. See, e.g., Remington's Pharmaceutical Sciences, Mack Publishing Company, Easton, PA.

[0382] One exemplary embodiment of the present disclosure comprises a pharmaceutical composition comprising (i) a plasma cell depleting agent, (ii) a B cell depleting agent and/or an immunoglobulin depleting agent, and (iii) a pharmaceutically acceptable carrier and/or excipient. Another exemplary embodiment of the present disclosure comprises a pharmaceutical composition comprising (i) an immunogen, (ii) a plasma cell depleting agent, (iii) optionally, a B cell depleting agent and/or an immunoglobulin depleting agent, and (iv) a pharmaceutically acceptable carrier and/or excipient.

[0383] In some embodiments, the plasma cell depleting agent comprises an antigen-binding molecule that specifically binds B cell maturation antigen (BCMA) and CD3. In some embodiments, the plasma cell depleting agent comprises an anti-BCMA×CD3 bispecific antibody, or functional fragment thereof, disclosed herein. Non-limiting examples of an anti-BCMA×CD3 bispecific antibody include linvoseltamab (REGN5458), REGN5459, pacanalotamab (AMG420), teclistamab (JNJ-64007957), AMG701, alnuctamab (CC-93269), EM801, EM901, elranatamab (PF-06863135), TNB383B (ABBV-383), and TNB384B. In a specific embodiment, the anti-BCMA×CD3 bispecific antibody is REGN5458. In another specific embodiment, the anti-BCMA×CD3 bispecific antibody is REGN5459.

[0384] In some embodiments, the anti-BCMA×CD3 bispecific antibody comprises: (a) a first antigen-binding domain (D1) that binds an epitope of human BCMA; and (b) a second antigen-binding domain (D2) that binds an epitope of human CD3.

[0385] In some embodiments, the B cell depleting agent comprises anti-CD19 and anti-CD20 antibodies, or functional fragments thereof, disclosed herein. In some embodiments, the B cell depleting agent comprises a CD20×CD3 antigen-binding molecule (e.g., REGN1979).

[0386] In some embodiments, the immunoglobulin depleting agent comprises a neonatal Fc receptor (FcRn) blocker. A non-limiting example of an FcRn blocker is efgartigimod alfa. In some embodiments, the immunoglobulin depleting agent comprises an IgG degrading enzyme.

[0387] In some embodiments, the immunogen is an immunogenic delivery vehicle, a polypeptide, or a polynucleotide. In some embodiments, the immunogen is an immunogenic delivery vehicle or a polypeptide or polynucleotide encoded by a transgene contained within the immunogenic delivery vehicle.

[0388] In some embodiments, the immunogen is an immunogenic delivery vehicle and/or transgene product(s).

[0389] In some embodiments, the immunogenic delivery vehicle is a viral vector, a virus-like particle (VLP), a lipid nanoparticle (LNP), a non-lipid nanoparticle, a liposome, a bacterial vector, a fungal vector, a protozoal vector, or a mammalian cell.

[0390] In some embodiments, the immunogenic delivery vehicle is a viral vector.

[0391] In some embodiments, the viral vector is derived from an adeno-associated virus (AAV), an adenovirus, a retrovirus, or an oncolytic virus.

[0392] In some embodiments, the viral vector is AAV. In some embodiments, the viral vector is recombinant AAV. In some embodiments, the viral vector is derived from AAV.

[0393] In some embodiments, the retrovirus is a lentivirus.

[0394] In some embodiments, the oncolytic virus is an adenovirus, a rhabdovirus, a herpes virus, a measles virus, a coxsackievirus, a poliovirus, a reovirus, a poxvirus, a parvovirus, Maraba virus, or Newcastle disease virus.

[0395] In some embodiments, the carrier is suitable for intravenous, intramuscular, oral, intraperitoneal, intratumoral, intrathecal, transdermal, topical, or subcutaneous administration.

[0396] In some embodiments, the pharmaceutical composition comprises an injectable preparation, such as a dosage form for intravenous, subcutaneous, intracutaneous, and intramuscular injections, drip infusions, etc. These injectable preparations may be prepared by known methods. For example, the injectable preparations may be prepared, e.g., by dissolving, suspending, or emulsifying the antibody or its salt described above in a sterile aqueous medium or an oily medium conventionally used for injections. As the aqueous medium for injections, there are, for example, physiological saline, an isotonic solution containing glucose and other auxiliary agents, etc., which may be used in combination with an appropriate solubilizing agent such as an alcohol (e.g., ethanol), a polyalcohol (e.g., propylene glycol, polyethylene glycol), a nonionic surfactant [e.g., polysorbate 80, HCO-50 (polyoxyethylene (50 mol) adduct of hydrogenated castor oil)], etc. As the oily medium, there are employed, e.g., sesame oil, soybean oil, etc., which may be used in combination with a solubilizing agent such as benzyl benzoate, benzyl alcohol, etc. The injection thus prepared can be filled in an appropriate ampoule.

[0397] The dose of a plasma cell depleting agent, a B cell depleting agent, an immunoglobulin depleting agent, and/or an immunogen (e.g., nucleic acid construct, nuclease agent or CRISPR/Cas system, e.g., in an immunogenic delivery vehicle) administered to a patient according to the present disclosure may vary depending upon the age and the size of the patient, symptoms, conditions, route of administration, and the like. The dose is typically calculated according to body weight or body surface area. Depending on the severity of the condition, the frequency and the duration of the treatment can be adjusted. Effective dosages and schedules for administering pharmaceutical compositions as disclosed herein may be determined empirically; for example, patient progress can be monitored by periodic assessment, and the dose adjusted accordingly. Moreover, interspecies scaling of dosages can be performed using well-known methods in the art (e.g., Mordenti et al., 1991, Pharmaceut. Res. 8:1351).

[0398] In some embodiments, e.g., for methods and compositions of the present disclosure involving administration of a plasma cell depleting agent which is a bispecific BCMA×CD3 antibody (e.g., REGN5458) to a subject, the dose of the bispecific BCMA×CD3 antibody (or pharmaceutical compositions thereof) is from about 1 mg/kg to about 30 mg/kg, such as from about 1 mg/kg to about 5 mg/kg, about 5 mg/kg to about 10 mg/kg, about 10 mg/kg to about 15 mg/kg, about 15 mg/kg to about 20 mg/kg, about 20 mg/kg to about 25 mg/kg, or about 25 mg/kg to about 30 mg/kg. In some embodiments, the bispecific BCMA×CD3 antibody (e.g., REGN5458) can be administered to the subject at a dose of about 1 mg/kg, about 2 mg/kg, about 3 mg/kg, about 4 mg/kg, about 5 mg/kg, about 6 mg/kg, about 7 mg/kg, about 8 mg/kg, about 9 mg/kg, about 10 mg/kg, about 11 mg/kg, about 12 mg/kg, about 13 mg/kg, about 14 mg/kg, about 15 mg/kg, about 16 mg/kg, about 17 mg/kg, about 18 mg/kg, about 19 mg/kg, about 20 mg/kg, about 21 mg/kg, about 22 mg/kg, about 23 mg/kg, about 24 mg/kg, about 25 mg/kg, about 26 mg/kg, about 27 mg/kg, about 28 mg/kg, about 29 mg/kg, or about 30 mg/kg. In one specific embodiment, the bispecific BCMA×CD3 antibody (e.g., REGN5458) (or pharmaceutical composition thereof) dose is about 20 mg/kg.

[0399] In some embodiments, e.g., for methods and compositions of the present disclosure involving administration of a B cell depleting agent which is a bispecific CD20×CD3 antibody (e.g., REGN1979) to a subject, the dose of the bispecific CD20×CD3 antibody (or pharmaceutical compositions thereof) is from about 0.05 mg/kg to about 3 mg/kg, such as from about 0.05 mg/kg to about 0.1 mg/kg, about 0.1 mg/kg to about 0.5 mg/kg, about 0.5 mg/kg to about 1 mg/kg, about 1 mg/kg to about 1.5 mg/kg, about 1.5 mg/kg to about 2 mg/kg, about 2 mg/kg to about 2.5 mg/kg, or about 2.5 mg/kg to about 3 mg/kg. In one specific embodiment, the bispecific CD20×CD3 antibody (e.g., REGN1979) is administered to the subject at a dose of about 0.1 mg/kg. In another specific embodiment, the bispecific CD20×CD3 antibody (e.g., REGN1979) is administered to the subject at a dose of about 1 mg/kg.

[0400] In some embodiments, e.g., for methods and compositions of the present disclosure involving administration of an immunoglobulin depleting agent which is efgartigimod to a subject, the dose of efgartigimod (or pharmaceutical compositions thereof) is from about 1 mg/kg to about 30 mg/kg, such as from about 1 mg/kg to about 5 mg/kg, about 5 mg/kg to about 10 mg/kg, about 10 mg/kg to about 15 mg/kg, about 15 mg/kg to about 20 mg/kg, about 20 mg/kg to about 25 mg/kg, or about 25 mg/kg to about 30 mg/kg. In some embodiments, efgartigimod can be administered to the subject at a dose of about 1 mg/kg, about 2 mg/kg, about 3 mg/kg, about 4 mg/kg, about 5 mg/kg, about 6 mg/kg, about 7 mg/kg, about 8 mg/kg, about 9 mg/kg, about 10 mg/kg, about 11 mg/kg, about 12 mg/kg, about 13 mg/kg, about 14 mg/kg, about 15 mg/kg, about 16 mg/kg, about 17 mg/kg, about 18 mg/kg, about 19 mg/kg, about 20 mg/kg, about 21 mg/kg, about 22 mg/kg, about 23 mg/kg, about 24 mg/kg, about 25 mg/kg, about 26 mg/kg, about 27 mg/kg, about 28 mg/kg, about 29 mg/kg, or about 30 mg/kg. In one specific embodiment, the efgartigimod (or pharmaceutical composition thereof) dose is about 20 mg/kg.

[0401] In some embodiments, e.g., for methods and compositions of the present disclosure involving administration of an immunogen which is an AAV to a subject, the dose of the AAV (or pharmaceutical compositions thereof) administered to a subject is between about 1×10⁵ plaque forming units (pfu) to about 1×10¹⁵ pfu. In some cases, the AAV can be administered to the subject at a dose from about 1×10⁸ pfu to about 1×10¹⁵ pfu, or from about 1×10¹⁰ pfu to about 1×10¹⁵ pfu, or from about 1×10⁸ pfu to about 1×10¹² pfu.

[0402] In some embodiments, the dose of the AAV (or pharmaceutical compositions thereof) administered to the subject is between about 1×10⁵ vg to about 1×10¹⁶ vg. In certain embodiments, the dose of the AAV administered to the subject is between about 1×10⁶ vg to about 1×10⁹ vg, about 1×10⁷ vg to about 1×10¹⁰ vg, about 1×10⁸ vg to about 1×10¹¹ vg, about 1×10⁹ vg to about 1×10¹² vg, about 1×10¹⁰ vg to about 1×10¹³ vg, about 1×10¹¹ vg to about 1×10¹⁴ vg, about 1×10¹² vg to about 1×10¹⁵ vg, about 1×10¹³ vg to about 1×10¹⁶ vg, or about 1×10¹⁴ vg to about 1×10¹⁶ vg. In certain embodiments, the dose of the AAV administered to the subject is between about 1×10¹⁰ vg to about 1×10¹⁶ vg. In certain embodiments, the dose of the AAV administered to the subject is at least about 1×10⁶ vg, at least about 1×10⁷ vg, at least about 1×10⁸ vg, at least about 1×10⁹ vg, at least about 1×10¹⁰ vg, at least about 1×10¹¹ vg, at least about 1×10¹² vg, at least about 1×10¹² vg, at least about 1×10¹³ vg, at least about 1×10¹⁴ vg, or at least about 1×10¹⁵ vg. In certain embodiments, the vg is total vector genome per subject.

[0403] In some embodiments, the dose of the AAV (or pharmaceutical compositions thereof) administered to the subject is about 1×10¹², 1×10¹³, 1×10¹⁴, 1×10¹⁵, and 1×10¹⁶ vector genomes (vg)/mL. Further examples of doses of AAV include about 1×10¹², about 1×10¹³, about 1×10¹⁴, about 1×10¹⁵, and about 1×10¹⁶ vector genomes (vg)/mL, or between about 1×10¹² to about 1×10¹⁶, between about 1×10¹² to about 1×10¹⁵, between about 1×10¹² to about 1×10¹⁴, between about 1×10¹² to about 1×10¹³, between about 1×10¹³ to about 1×10¹⁶, between about 1×10¹⁴ to about 1×10¹⁶, between about 1×10¹⁵ to about 1×10¹⁶, or between about 1×10¹³ to about 1×10¹⁵ vg/mL.

[0404] Other examples of doses of AAV (or pharmaceutical compositions thereof) include about 1×10¹², about 1×10¹³, about 1×10¹⁴, about 1×10¹⁵, and about 1×10¹⁶ vector genomes (vg)/kg of body weight, or between about 1×10¹² to about 1×10¹⁶, between about 1×10¹² to about 1×10¹⁵, between about 1×10¹² to about 1×10¹⁴, between about 1×10¹² to about 1×10¹³, between about 1×10¹³ to about 1×10¹⁶, between about 1×10¹⁴ to about 1×10¹⁶, between about 1×10¹⁵ to about 1×10¹⁶, or between about 1×10¹³ to about 1×10¹⁵ vg/kg of body weight.

[0405] In one example, the AAV dose (or pharmaceutical compositions thereof) is between about 1×10¹³ to about 1×10¹⁴ vg/mL or vg/kg. In another example, the AAV dose is between about 1×10¹² to about 1×10¹³ vg/mL or vg/kg (e.g., between about 1×10¹² to about 1×10¹³ vg/kg). In another example, the AAV dose is between about 1×10¹² to about 1×10¹⁴ vg/mL or vg/kg (e.g., between about 1×10¹² to about 1×10¹⁴ vg/kg).

[0406] In one specific embodiment, the AAV dose (or pharmaceutical composition thereof) is about 3×10¹¹ vg/kg. In one specific embodiment, the AAV dose (or pharmaceutical composition thereof) is about 6×10¹¹ vg/kg. In another specific embodiment, the AAV dose (or pharmaceutical composition thereof) is about 9×10¹¹ vg/kg. In another specific embodiment, the AAV dose (or pharmaceutical composition thereof) is about 3×10¹² vg/kg. In one specific embodiment, the AAV dose (or pharmaceutical composition thereof) is about 1×10¹³ vg/kg. In another specific embodiment, the AAV dose (or pharmaceutical composition thereof) is about 6×10¹³ vg/kg.

[0407] Various delivery systems are known and can be used to administer the pharmaceutical composition, e.g., encapsulation in liposomes, microparticles, microcapsules, recombinant cells capable of expressing, e.g., recombinant viruses comprising any components of the compositions disclosed herein, and a soluble carrier system that takes advantage of receptor mediated endocytosis (see, e.g., Wu et al., 1987, J. Biol. Chem. 262:4429-4432). Methods of administration include, but are not limited to, intradermal, intramuscular, intraperitoneal, intratumoral, intravenous, subcutaneous, intranasal, epidural, and oral routes. The composition may be administered by any convenient route, for example by infusion or bolus injection, by absorption through epithelial or mucocutaneous linings (e.g., oral mucosa, rectal and intestinal mucosa, etc.) and may be administered together with other biologically active agents. In some embodiments, a pharmaceutical composition as disclosed herein is administered intravenously. In some embodiments, a pharmaceutical composition as disclosed herein is administered subcutaneously. In some embodiments, a pharmaceutical composition as disclosed herein is administered intratumorally.

[0408] In some embodiments, a plasma cell depleting agent, a B cell depleting agent, an immunoglobulin depleting agent, and/or an immunogen (e.g., nucleic acid construct, nuclease agent or CRISPR/Cas system, e.g., in an immunogenic delivery vehicle), or a pharmaceutical composition(s) thereof, is contained within a container. Thus, in another aspect, containers comprising an antigen-binding molecule and/or pharmaceutical composition as disclosed herein are provided. For example, in some embodiments, an antibody and/or pharmaceutical composition is contained within a container selected from the group consisting of a glass vial, a syringe, a pen delivery device, and an autoinjector.

[0409] In some embodiments, a plasma cell depleting agent, a B cell depleting agent, an immunoglobulin depleting agent, and/or an immunogen (e.g., nucleic acid construct, nuclease agent or CRISPR/Cas system, e.g., in an immunogenic delivery vehicle), or a pharmaceutical composition(s) thereof, of the present disclosure is delivered, e.g., subcutaneously or intravenously, such as with a standard needle and syringe. In some embodiments, the syringe is a pre-filled syringe. In some embodiments, a pen delivery device or autoinjector is used to deliver a pharmaceutical composition of the present disclosure (e.g., for subcutaneous delivery). A pen delivery device can be reusable or disposable. A reusable pen delivery device generally utilizes a replaceable cartridge that contains a pharmaceutical composition. Once all of the pharmaceutical composition within the cartridge has been administered and the cartridge is empty, the empty cartridge can readily be discarded and replaced with a new cartridge that contains the pharmaceutical composition. The pen delivery device can then be reused. In a disposable pen delivery device, there is no replaceable cartridge. Rather, the disposable pen delivery device comes prefilled with the pharmaceutical composition held in a reservoir within the device. Once the reservoir is emptied of the pharmaceutical composition, the entire device is discarded.

[0410] Examples of suitable pen and autoinjector delivery devices include, but are not limited to AUTOPEN™ (Owen Mumford, Inc., Woodstock, UK), DISETRONIC™ pen (Disetronic Medical Systems, Bergdorf, Switzerland), HUMALOG MIX 75/25™ pen, HUMALOG™ pen, HUMALIN 70/30™ pen (Eli Lilly and Co., Indianapolis, IN), NOVOPEN™ I, II and III (Novo Nordisk, Copenhagen, Denmark), NOVOPEN JUNIOR™ (Novo Nordisk, Copenhagen, Denmark), BD™ pen (Becton Dickinson, Franklin Lakes, NJ), OPTIPEN™, OPTIPEN PRO™, OPTIPEN STARLET™, and OPTICLIK™ (sanofi-aventis, Frankfurt, Germany). Examples of disposable pen delivery devices having applications, e.g., in subcutaneous delivery of a pharmaceutical composition of the present invention include, but are not limited to the SOLOSTAR™ pen (sanofi-aventis), the FLEXPEN™ (Novo Nordisk), the KWIKPEN™ (Eli Lilly), the SURECLICK™ Autoinjector (Amgen, Thousand Oaks, CA), the PENLET™ (Haselmeier, Stuttgart, Germany), the EPIPEN (Dey, L. P.), and the HUMIRA™ Pen (Abbott Labs, Abbott Park IL).

[0411] In some embodiments, the pharmaceutical compositions of the present disclosure can be delivered using a controlled release system. In one embodiment, a pump may be used (see, e.g., Langer, supra; Sefton, 1987, CRC Crit. Ref Biomed. Eng. 14:201). In another embodiment, polymeric materials can be used; see Medical Applications of Controlled Release, Langer and Wise (eds.), 1974, CRC Pres., Boca Raton, Florida. In yet another embodiment, a controlled release system can be placed in proximity of the composition's target, thus requiring only a fraction of the systemic dose (see, e.g., Goodson, 1984, in Medical Applications of Controlled Release, supra, vol. 2, pp. 115-138). Other controlled release systems are discussed in the review by Langer, 1990, Science 249:1527-1533.

[0412] In some embodiments, pharmaceutical compositions as described herein are prepared into dosage forms in a unit dose suited to fit a dose of the active ingredients. Such dosage forms in a unit dose include, for example, tablets, pills, capsules, injections (ampoules), suppositories, etc. In some embodiments, the amount of the antigen-binding molecule contained in the dosage form is about 5 to about 1000 mg, e.g., from about 5 to about 500 mg, from about 5 to about 100 mg, or from about 10 to about 250 mg.

[0413] Plasma cell depleting agents, B cell depleting agents, immunoglobulin depleting agents, and/or immunogens (e.g., nucleic acid construct, nuclease agent or CRISPR/Cas system, e.g., in an immunogenic delivery vehicle), introduced into the subject or cell can be provided in compositions comprising a carrier, thereby increasing the stability of the introduced molecules (e.g., prolonging the period under given conditions of storage (e.g., −20° C., 4° C., or ambient temperature) for which degradation products remain below a threshold, such below 0.5% by weight of the starting nucleic acid or protein; or increasing the stability in vivo). Non-limiting examples of such carriers include poly(lactic acid) (PLA) microspheres, poly(D,L-lactic-coglycolic-acid) (PLGA) microspheres, liposomes, micelles, inverse micelles, lipid cochleates, and lipid microtubules.

[0414] Various methods and compositions are provided herein to allow for introduction of a molecule (e.g., a nucleic acid or protein) into a cell or subject. Methods for introducing molecules into various cell types are known and include, for example, stable transfection methods, transient transfection methods, and virus-mediated methods.

[0415] Transfection protocols as well as protocols for introducing molecules into cells may vary. Non-limiting transfection methods include chemical-based transfection methods using liposomes; nanoparticles; calcium phosphate (Graham et al. (1973) Virology 52 (2): 456-67, Bacchetti et al. (1977) Proc. Natl. Acad. Sci. U.S.A. 74 (4):1590-4, and Kriegler, M (1991). Transfer and Expression: A Laboratory Manual. New York: W. H. Freeman and Company. pp. 96-97); dendrimers; or cationic polymers such as DEAE-dextran or polyethylenimine. Non-chemical methods include electroporation, sonoporation, and optical transfection. Particle-based transfection can include the use of a gene gun or magnet-assisted transfection (Bertram (2006) Current Pharmaceutical Biotechnology 7, 277-28). Viral methods can also be used for transfection.

[0416] Introduction of nucleic acids or proteins into a cell can also be mediated by electroporation, by intracytoplasmic injection, by viral infection, by adenovirus, by adeno-associated virus, by lentivirus, by retrovirus, by transfection, by lipid-mediated transfection, or by nucleofection. Nucleofection is an improved electroporation technology that enables nucleic acid substrates to be delivered not only to the cytoplasm but also through the nuclear membrane and into the nucleus. In addition, use of nucleofection in the methods disclosed herein typically requires much fewer cells than regular electroporation (e.g., only about 2 million cells as compared with 7 million cells by regular electroporation). In one example, nucleofection is performed using the LONZA® NUCLEOFECTOR™ system.

[0417] Introduction of molecules (e.g., nucleic acids or proteins) into a cell (e.g., a zygote) can also be accomplished by microinjection. In zygotes (i.e., one-cell stage embryos), microinjection can be into the maternal and/or paternal pronucleus or into the cytoplasm. If the microinjection is into only one pronucleus, the paternal pronucleus is preferable due to its larger size.

[0418] Other methods for introducing molecules (e.g., nucleic acid or proteins) into a cell or subject can include, for example, vector delivery, particle-mediated delivery, exosome-mediated delivery, lipid-nanoparticle-mediated delivery, cell-penetrating-peptide-mediated delivery, or implantable-device-mediated delivery. As specific examples, a nucleic acid or protein can be introduced into a cell or subject in a carrier such as a poly(lactic acid) (PLA) microsphere, a poly(D,L-lactic-coglycolic-acid) (PLGA) microsphere, a liposome, a micelle, an inverse micelle, a lipid cochleate, or a lipid microtubule. Some specific examples of delivery to a subject include hydrodynamic delivery, virus-mediated delivery (e.g., adeno-associated virus (AAV)-mediated delivery), and lipid-nanoparticle-mediated delivery.

[0419] Introduction of nucleic acids or proteins into cells or subjects can be accomplished by hydrodynamic delivery (HDD). For gene delivery to parenchymal cells, only essential DNA sequences need to be injected via a selected blood vessel, eliminating safety concerns associated with current viral and synthetic vectors. When injected into the bloodstream, DNA is capable of reaching cells in the different tissues accessible to the blood. Hydrodynamic delivery employs the force generated by the rapid injection of a large volume of solution into the incompressible blood in the circulation to overcome the physical barriers of endothelium and cell membranes that prevent large and membrane-impermeable compounds from entering parenchymal cells. In addition to the delivery of DNA, this method is useful for the efficient intracellular delivery of RNA, proteins, and other small compounds in vivo. See, e.g., Bonamassa et al. (2011) Pharm. Res. 28(4):694-701, herein incorporated by reference in its entirety for all purposes.

[0420] Introduction of nucleic acids can also be accomplished by virus-mediated delivery, such as AAV-mediated delivery or lentivirus-mediated delivery. Other exemplary viruses/viral vectors which can be useful in accomplishing virus-mediated delivery include retroviruses, adenoviruses, vaccinia viruses, poxviruses, and herpes simplex viruses. The viruses can infect dividing cells, non-dividing cells, or both dividing and non-dividing cells. The viruses can integrate into the host genome or, alternatively, do not integrate into the host genome. Such viruses can also be engineered to have reduced immunity. The viruses can be replication-competent or can be replication-defective (e.g., defective in one or more genes necessary for additional rounds of virion replication and/or packaging). Viruses can cause transient expression or longer-lasting expression. Viral vectors may be genetically modified from their wild type counterparts. For example, the viral vector may comprise an insertion, deletion, or substitution of one or more nucleotides to facilitate cloning or such that one or more properties of the vector is changed. Such properties may include packaging capacity, transduction efficiency, immunogenicity, genome integration, replication, transcription, and translation. In some examples, a portion of the viral genome may be deleted such that the virus is capable of packaging exogenous sequences having a larger size. In some examples, the viral vector may have an enhanced transduction efficiency. In some examples, the immune response induced by the virus in a host may be reduced. In some examples, viral genes (such as integrase) that promote integration of the viral sequence into a host genome may be mutated such that the virus becomes non-integrating. In some examples, the viral vector may be replication defective. In some examples, the viral vector may comprise exogenous transcriptional or translational control sequences to drive expression of coding sequences on the vector. In some examples, the virus may be helper-dependent. For example, the virus may need one or more helper virus to supply viral components (such as viral proteins) required to amplify and package the vectors into viral particles. In such a case, one or more helper components, including one or more vectors encoding the viral components, may be introduced into a host cell or population of host cells along with the vector system described herein. In other examples, the virus may be helper-free. For example, the virus may be capable of amplifying and packaging the vectors without a helper virus. In some examples, the vector system described herein may also encode the viral components required for virus amplification and packaging.

[0421] Exemplary viral titers (e.g., AAV titers) include about 10¹², about 10¹³, about 10¹⁴, about 10¹⁵, and about 10¹⁶ vector genomes (vg)/mL, or between about 10¹² to about 10¹⁶, between about 10¹² to about 10¹⁵, between about 10¹² to about 10¹⁴, between about 10¹² to about 10¹³, between about 10¹³ to about 10¹⁶, between about 10¹⁴ to about 10¹⁶, between about 10¹⁵ to about 10¹⁶, or between about 10¹³ to about 10¹⁵ vg/mL. Other exemplary viral titers (e.g., AAV titers) include about 10¹², about 10¹³, about 10¹⁴, about 10¹⁵, and about 10¹⁶ vector genomes (vg)/kg of body weight, or between about 10¹² to about 10¹⁶, between about 10¹² to about 10¹³, between about 10¹² to about 10¹⁴, between about 10¹² to about 10¹³, between about 10¹³ to about 10¹⁶, between about 10¹⁴ to about 10¹⁶, between about 10¹⁵ to about 10¹⁶, or between about 10¹³ to about 10¹⁵ vg/kg of body weight. In one example, the viral titer is between about 10¹³ to about 10¹⁴ vg/mL or vg/kg. In another example, the viral titer is between about 10¹² to about 10¹³ vg/mL or vg/kg (e.g., between about 10¹² to about 10¹³ vg/kg). In another example, the viral titer is between about 10¹² to about 10¹⁴ vg/mL or vg/kg (e.g., between about 10¹² to about 10¹⁴ vg/kg).

[0422] In yet another aspect, the present disclosure includes compositions and therapeutic formulations comprising any of the plasma cell depleting agents, B cell depleting agents, immunoglobulin depleting agents, and/or immunogens (e.g., nucleic acid construct, nuclease agent or CRISPR/Cas system, e.g., in an immunogenic delivery vehicle), described herein in combination with one or more additional therapeutic agents, and methods of treatment comprising administering such combinations to subjects in need thereof. In some embodiments, the additional therapeutic agent(s) is an immunomodulatory agent or anti-inflammatory agent. In some embodiments, the additional therapeutic agent(s) is immunosuppressive therapy. In some embodiments, the additional therapeutic agent(s) is a surgical procedure.

[0423] Exemplary additional therapeutic agents that may be combined with or administered in combination with any of the plasma cell depleting agents, B cell depleting agents, immunoglobulin depleting agents, and/or immunogens (e.g., nucleic acid construct, nuclease agent or CRISPR/Cas system, e.g., in an immunogenic delivery vehicle), of the present disclosure include, e.g., an anti-CD38 antibody (e.g., daratumumab), a proteasome inhibitor, a histone deacetylase inhibitor, a B-cell activating factor (BAFF) inhibitor, an APRIL inhibitor, a steroid (e.g., corticosteroids such as topical, systemic, oral, or inhaled corticosteroids, including, but not limited to, betamethasone, clobetasol, dexamethasone, fluocinolone, fluocinonide, halobetasol, hydrocortisone, methylprednisolone, prednisone, prednisolone, or triamcinolone); a non-steroidal topical medication such as, but not limited to, a phosphodiesterase 4 (PDE4) inhibitor or a calcineurin inhibitor; a non-steroidal anti-inflammatory drug (NSAID) such as, but not limited to, celecoxib, diclofenac, etodolac, fenprofen, flurbiprofen, ibuprofen, ketoprofen, meclofamate, meloxicam, nabumetone, naproxen, oxaprozin, piroxicam, rofecoxib, salicylates, sulfasalazinem, sulindac, or tolmetin; an anti-inflammatory antibody or biologic (e.g., an anti-tumor necrosis factor alpha (anti-TNFα) antibody or biologic such as, but not limited to, adalimumab, certolizumab, etanercept, golimumab, or infliximab; an anti-IL1 antibody or biologic such as, but not limited to, LY2189102, anakinra, canakinumab, gerokizumab, or rilonacept; an anti-interleukin 6/interleukin-6 receptor (anti-IL6/IL-6R) antibody or biologic such as, but not limited to, sarilumab, siltuximab, or tocilizumab; an anti-IL17A/IL-17R antibody or biologic such as, but not limited to, bimekizumab, brodalumab, ixekizumab, or secukinumab; or an anti-IL12/IL-23 antibody or biologic such as, but not limited to, AMG139, BI655066, brazikumab, briankizumab, guselkumab, mirikizumab, risankizumab, tildrakizumab, or ustekinumab); a JAK inhibitor such as, but not limited to, abrocitinib, baricitinib, fedratinib, filgotinib, ruxolitinib, tofacitinib, or upadacitinib; an immunosuppressive agent (e.g., a systemic immunosuppressant such as but not limited to methotrexate, cyclophosphamide, mizoribine, chlorambucil, cyclosporine, mycophenolate mofetil, or azathioprine); a disease-modifying antirheumatic drug (DMARD) such as, but not limited, to apremilast, azathioprine, baricitinib, cyclophosphamide, cyclosporine, hydroxychloroquine, leflunomide, methotrexate, mycophenolate mofetil, sulfasalazine, or tofacitinib; radiation therapy; chemotherapy; intravenous immunoglobulin therapy; or a surgery or a surgical procedure (such as, but not limited to, splenectomy, lymphadenectomy, thyroidectomy, plasmapheresis, leukapheresis, therapeutic plasma exchange, immunoadsorption, or cell, tissue, or organ transplantation). In some embodiments, the surgery or surgical procedure as described herein is used in combination with the anti-BCMA×CD3 bispecific antibody or the anti-CD20×CD3 bispecific antibody and in place of the FcRn blocker.

[0424] In some embodiments, a plasma cell depleting agent, a B cell depleting agent, an immunoglobulin depleting agent, and/or an immunogen (e.g., nucleic acid construct, nuclease agent or CRISPR/Cas system, e.g., in an immunogenic delivery vehicle) described herein may be administered with an additional therapeutic agent comprising, e.g., a broad-spectrum immunosuppression methodology, or combination thereof, including broad spectrum immunosuppression (calcineurin inhibitors [tacrolimus, cyclosporine], rapamycin, MMF, corticosteroids, methotrexate, proteasome inhibitors, costimulation blockade [CTLA4-Ig/abatacept/belatacept], Src kinase inhibitors [dasatinib], Btk inhibitors [acalabrutinib]), B cell depleting agents (rituximab), IgG degrading enzymes (IdeS), IgG half-life reducers (FcRn blockers), or combinations thereof.

[0425] The additional therapeutically active component(s) may be administered just prior to, concurrent with, or shortly after the administration of the plasma cell depleting agent, the B cell depleting agent, the immunoglobulin depleting agent, and/or the immunogen (e.g., nucleic acid construct, nuclease agent or CRISPR/Cas system, e.g., in an immunogenic delivery vehicle), or the pharmaceutical composition(s) thereof, of the present disclosure. Such administration regimens can be considered, for example, the administration of a plasma cell depleting agent, a B cell depleting agent, an immunoglobulin depleting agent, and/or an immunogen (e.g., nucleic acid construct, nuclease agent or CRISPR/Cas system, e.g., in an immunogenic delivery vehicle), or a pharmaceutical composition(s) thereof, “in combination with” an additional therapeutically active component.

[0426] The present disclosure includes pharmaceutical compositions in which a plasma cell depleting agent, a B cell depleting agent, an immunoglobulin depleting agent, and/or an immunogen (e.g., nucleic acid construct, nuclease agent or CRISPR/Cas system, e.g., in an immunogenic delivery vehicle) of the present invention is co-formulated with one or more of the additional therapeutically active component(s) as described elsewhere herein.

[0427] Therapeutic or pharmaceutical compositions comprising the compositions or combinations disclosed herein can be administered with suitable carriers, excipients, and other agents that are incorporated into formulations to provide improved transfer, delivery, tolerance, and the like. A multitude of appropriate formulations can be found in the formulary known to all pharmaceutical chemists: Remington's Pharmaceutical Sciences, Mack Publishing Company, Easton, PA. See also Powell et al. “Compendium of excipients for parenteral formulations” PDA (1998) J. Pharm. Sci. Technol. 52:238-311. In certain embodiments, the pharmaceutical compositions are non-pyrogenic.

### XV. Nucleic Acid Constructs Encoding a Polypeptide of Interest

[0428] The compositions and methods described herein include the use of a nucleic acid construct that comprises a coding sequence for a polypeptide of interest (e.g., an exogenous polypeptide coding sequence). The compositions and methods described herein can also include the use of a nucleic acid construct that comprises a polypeptide of interest coding sequence or a reverse complement of the polypeptide of interest coding sequence (e.g., an exogenous polypeptide coding sequence or a reverse complement of the exogenous polypeptide coding sequence). Such nucleic acid constructs can be for insertion into a target genomic locus or into a cleavage site created by a nuclease agent or CRISPR/Cas system as disclosed elsewhere herein. The term cleavage site includes a DNA sequence at which a nick or double-strand break is created by a nuclease agent (e.g., a Cas9 protein complexed with a guide RNA). In some embodiments, a double-stranded break is created by a Cas9 protein complexed with a guide RNA, e.g., a Spy Cas9 protein complexed with a Spy Cas9 guide RNA. In some cases, the polypeptide of interest is an exogenous polypeptide as defined herein.

[0429] In a specific example, the compositions and methods described herein include the use of a nucleic acid construct encoding a Factor IX protein. Such nucleic acid constructs can be for insertion into a target genomic locus following cleavage at a cleavage site by a nuclease agent or CRISPR/Cas system as disclosed elsewhere herein or can be for expression of the Factor IX protein without insertion into a target genomic locus or a cleavage site (e.g., in an episome). The term cleavage site includes a DNA sequence at which a nick or double-strand break is created by a nuclease agent (e.g., a Cas9 protein complexed with a guide RNA). In certain embodiments, the cleavage site includes a DNA sequence at which a double-strand break is created by a Cas9 protein complexed with a guide RNA, e.g., a Spy Cas9 protein complexed with a Spy Cas9 guide RNA.

[0430] In another specific example, the compositions and methods described herein include the use of a nucleic acid construct that comprises a multidomain therapeutic protein (e.g., GAA fusion protein) coding sequence (a multidomain therapeutic protein nucleic acid). See, e.g., PCT/US2023/061858 and U.S. Ser. No. 18/163,698, each of which is herein incorporated by reference in its entirety for all purposes. Such nucleic acid constructs can be for insertion into a target genomic locus following cleavage at a cleavage site by a nuclease agent or CRISPR/Cas system as disclosed elsewhere herein or can be for expression of the multidomain therapeutic protein without insertion into a target genomic locus or a cleavage site (e.g., in an episome).

[0431] The length of the nucleic acid constructs disclosed herein can vary. The construct can be, for example, from about 1 kb to about 5 kb, such as from about 1 kb to about 4.5 kb or about 1 kb to about 4 kb. An exemplary nucleic acid construct is between about 1 kb to about 5 kb in length or between about 1 kb to about 4 kb in length. Alternatively, a nucleic acid construct can be between about 1 kb to about 1.5 kb, about 1.5 kb to about 2 kb, about 2 kb to about 2.5 kb, about 2.5 kb to about 3 kb, about 3 kb to about 3.5 kb, about 3.5 kb to about 4 kb, about 4 kb to about 4.5 kb, or about 4.5 kb to about 5 kb in length. Alternatively, a nucleic acid construct can be, for example, no more than 5 kb, no more than 4.5 kb, no more than 4 kb, no more than 3.5 kb, no more than 3 kb, or no more than 2.5 kb in length.

[0432] The constructs can comprise deoxyribonucleic acid (DNA) or ribonucleic acid (RNA), can be single-stranded, double-stranded, or partially single-stranded and partially double-stranded, and can be introduced into a host cell in linear or circular (e.g., minicircle) form. See, e.g., US 2010/0047805, US 2011/0281361, and US 2011/0207221, each of which is herein incorporated by reference in their entirety for all purposes. If introduced in linear form, the ends of the construct can be protected (e.g., from exonucleolytic degradation) by known methods. For example, one or more dideoxynucleotide residues can be added to the 3′ terminus of a linear molecule and/or self-complementary oligonucleotides can be ligated to one or both ends. See, e.g., Chang et al. (1987) Proc. Natl. Acad. Sci. U.S.A. 84:4959-4963 and Nehls et al. (1996) Science 272:886-889, each of which is herein incorporated by reference in their entirety for all purposes. Additional methods for protecting exogenous polynucleotides from degradation include, but are not limited to, addition of terminal amino group(s) and the use of modified internucleotide linkages such as, for example, phosphorothioates, phosphoramidates, and O-methyl ribose or deoxyribose residues. A construct can be introduced into a cell as part of a vector molecule having additional sequences such as, for example, replication origins, promoters, and genes encoding antibiotic resistance. A construct may omit viral elements. Moreover, constructs can be introduced as a naked nucleic acid, can be introduced as a nucleic acid complexed with an agent such as a liposome or poloxamer, or can be delivered by viruses (e.g., adenovirus, adeno-associated virus (AAV), herpesvirus, retrovirus, or lentivirus).

[0433] The constructs disclosed herein can be modified on either or both ends to include one or more suitable structural features as needed and/or to confer one or more functional benefit. For example, structural modifications can vary depending on the method(s) used to deliver the constructs disclosed herein to a host cell (e.g., use of viral vector delivery or packaging into lipid nanoparticles for delivery). Such modifications include, for example, terminal structures such as inverted terminal repeats (ITR), hairpin, loops, and other structures such as toroids. For example, the constructs disclosed herein can comprise one, two, or three ITRs or can comprise no more than two ITRs. Various methods of structural modifications are known.

[0434] Some constructs may be inserted so that their expression is driven by the endogenous promoter at the insertion site (e.g., the endogenous ALB promoter when the construct is integrated into the host cell's ALB locus). Such constructs may not comprise a promoter that drives the expression of the polypeptide of interest. For example, the expression of the polypeptide of interest can be driven by a promoter of the host cell (e.g., the endogenous ALB promoter when the transgene is integrated into a host cell's ALB locus). In such cases, the construct may lack control elements (e.g., promoter and/or enhancer) that drive its expression (e.g., a promoterless construct). Nonetheless, in other cases the construct may comprise a promoter and/or enhancer, for example, a constitutive promoter or an inducible or tissue-specific (e.g., liver- or platelet-specific) promoter that drives expression of the polypeptide of interest in an episome or upon integration. Non-limiting exemplary constitutive promoters include cytomegalovirus immediate early promoter (CMV), simian virus (SV40) promoter, adenovirus major late (MLP) promoter, Rous sarcoma virus (RSV) promoter, mouse mammary tumor virus (MMTV) promoter, phosphoglycerate kinase (PGK) promoter, elongation factor-alpha (EF1a) promoter, ubiquitin promoters, actin promoters, tubulin promoters, immunoglobulin promoters, a functional fragment thereof, or a combination of any of the foregoing. For example, the promoter may be a CMV promoter or a truncated CMV promoter. In another example, the promoter may be an EF1a promoter. Non-limiting exemplary inducible promoters include those inducible by heat shock, light, chemicals, peptides, metals, steroids, antibiotics, or alcohol. The inducible promoter may be one that has a low basal (non-induced) expression level, such as the Tet-On® promoter (Clontech). Although not required for expression, the constructs may comprise transcriptional or translational regulatory sequences such as promoters, enhancers, insulators, internal ribosome entry sites, additional sequences encoding peptides, and/or polyadenylation signals. The construct may comprise a sequence encoding a polypeptide of interest downstream of and operably linked to a signal sequence encoding a signal peptide. In some examples, the nucleic acid construct works in homology-independent insertion of a nucleic acid that encodes a polypeptide of interest. Such nucleic acid constructs can work, for example, in non-dividing cells (e.g., cells in which non-homologous end joining (NHEJ), not homologous recombination (HR), is the primary mechanism by which double-stranded DNA breaks are repaired) or dividing cells (e.g., actively dividing cells). Such constructs can be, for example, homology-independent donor constructs. In preferred embodiments, promoters and other regulatory sequences are appropriate for use in humans, e.g., recognized by regulatory factors in human cells, e.g., in human liver cells, and acceptable to regulatory authorities for use in humans.

[0435] The constructs disclosed herein can be modified to include or exclude any suitable structural feature as needed for any particular use and/or that confers one or more desired function. For example, some constructs disclosed herein do not comprise a homology arm. Some constructs disclosed herein are capable of insertion into a target genomic locus or a cut site in a target DNA sequence for a nuclease agent (e.g., capable of insertion into a safe harbor gene, such as an ALB locus) by non-homologous end joining. For example, such constructs can be inserted into a blunt end double-strand break following cleavage with a nuclease agent (e.g., CRISPR/Cas system, e.g., a SpyCas9 CRISPR/Cas system) as disclosed herein. In a specific example, the construct can be delivered via AAV and can be capable of insertion by non-homologous end joining (e.g., the construct does not comprise a homology arm).

[0436] In a particular example, the construct can be inserted via homology-independent targeted integration. For example, the polypeptide of interest coding sequence in the construct can be flanked on each side by a target site for a nuclease agent (e.g., the same target site as in the target DNA sequence for targeted insertion (e.g., in a safe harbor gene), and the same nuclease agent being used to cleave the target DNA sequence for targeted insertion). The nuclease agent can then cleave the target sites flanking the polypeptide of interest coding sequence. In a specific example, the construct is delivered AAV-mediated delivery, and cleavage of the target sites flanking the polypeptide of interest coding sequence can remove the inverted terminal repeats (ITRs) of the AAV. In some instances, the target DNA sequence for targeted insertion (e.g., target DNA sequence in a safe harbor locus such as a gRNA target sequence including the flanking protospacer adjacent motif) is no longer present if the polypeptide of interest coding sequence is inserted into the cut site or target DNA sequence in the correct orientation but it is reformed if the polypeptide of interest coding sequence is inserted into the cut site or target DNA sequence in the opposite orientation. This can help ensure that the polypeptide of interest coding sequence is inserted in the correct orientation for expression.

[0437] The constructs disclosed herein can comprise a polyadenylation sequence or polyadenylation tail sequence (e.g., downstream or 3′ of a polypeptide of interest coding sequence). Methods of designing a suitable polyadenylation tail sequence are well-known. The polyadenylation tail sequence can be encoded, for example, as a “poly-A” stretch downstream of the polypeptide of interest coding sequence. A poly-A tail can comprise, for example, at least 20, 30, 40, 50, 60, 70, 80, 90, or 100 adenines, and optionally up to 300 adenines. In a specific example, the poly-A tail comprises 95, 96, 97, 98, 99, or 100 adenine nucleotides. Methods of designing a suitable polyadenylation tail sequence and/or polyadenylation signal sequence are well known. For example, the polyadenylation signal sequence AAUAAA is commonly used in mammalian systems, although variants such as UAUAAA or AU/GUAAA have been identified. See, e.g., Proudfoot (2011) Genes & Dev. 25(17):1770-82, herein incorporated by reference in its entirety for all purposes. The term polyadenylation signal sequence refers to any sequence that directs termination of transcription and addition of a poly-A tail to the mRNA transcript. In eukaryotes, transcription terminators are recognized by protein factors, and termination is followed by polyadenylation, a process of adding a poly(A) tail to the mRNA transcripts in presence of the poly(A) polymerase. The mammalian poly(A) signal typically consists of a core sequence, about 45 nucleotides long, that may be flanked by diverse auxiliary sequences that serve to enhance cleavage and polyadenylation efficiency. The core sequence consists of a highly conserved upstream element (AATAAA or AAUAAA) in the mRNA, referred to as a poly A recognition motif or poly A recognition sequence), recognized by cleavage and polyadenylation-specificity factor (CPSF), and a poorly defined downstream region (rich in Us or Gs and Us), bound by cleavage stimulation factor (CstF). Examples of transcription terminators that can be used include, for example, the human growth hormone (HGH) polyadenylation signal, the simian virus 40 (SV40) late polyadenylation signal, the rabbit beta-globin polyadenylation signal, the bovine growth hormone (BGH) polyadenylation signal, the phosphoglycerate kinase (PGK) polyadenylation signal, an AOX1 transcription termination sequence, a CYC1 transcription termination sequence, or any transcription termination sequence known to be suitable for regulating gene expression in eukaryotic cells. In one example, the polyadenylation signal is a simian virus 40 (SV40) late polyadenylation signal. For example, the polyadenylation signal can comprise, consist essentially of, or consist of SEQ ID NO: 292 or 284. For example, the polyadenylation signal can comprise, consist essentially of, or consist of SEQ ID NO: 292. In another example, the polyadenylation signal is a bovine growth hormone (BGH) polyadenylation signal or a CpG depleted BGH polyadenylation signal. For example, the polyadenylation signal can comprise, consist essentially of, or consist of SEQ ID NO: 285.

[0438] In one example, the polyadenylation signal can comprise a BGH polyadenylation signal. For example, the BGH polyadenylation signal can comprise, consist essentially of, or consist of SEQ ID NO: 858. In another example, the polyadenylation signal can comprise an SV40 polyadenylation signal. For example, the SV40 polyadenylation signal can be a unidirectional SV40 late polyadenylation signal. For example, the transcription terminator sequences that are present in the “early” inverse orientation of SV40 can be mutated (e.g., by mutating the reverse strand AAUAAA sequences to AAUCAA). The SV40 polyA is bidirectional, but the polyadenylation in the “late” orientation is more efficient than the polyadenylation in the “early” orientation. For example, the unidirectional SV40 late polyadenylation signal can comprise, consist essentially of, or consist of SEQ ID NO: 859. In another example, a synthetic polyadenylation signal can be used. For example, the synthetic polyadenylation signal can comprise, consist essentially of, or consist of SEQ ID NO: 860. In another example, two or more polyadenylation signals can be used in combination. For example, the polyadenylation signal can comprise a combination of a BGH polyadenylation signal and an SV40 polyadenylation signal (e.g., an SV40 late polyadenylation signal, such as a unidirectional SV40 late polyadenylation signal). For example, the polyadenylation signal can comprise a combination of a BGH polyadenylation signal and a unidirectional SV40 late polyadenylation signal. For example, the BGH polyadenylation signal can comprise, consist essentially of, or consist of SEQ ID NO: 858, and the unidirectional SV40 late polyadenylation signal can comprise, consist essentially of, or consist of SEQ ID NO: 859. In a specific example, the BGH polyadenylation signal can be upstream (5′) of the SV40 polyadenylation signal (e.g., unidirectional SV40 late polyadenylation signal). For example, the combined polyadenylation signal can comprise the sequence set forth in SEQ ID NO: 902. In another example, the polyadenylation signal can comprise a combination of a BGH polyadenylation signal and a synthetic polyadenylation signal. For example, the BGH polyadenylation signal can comprise, consist essentially of, or consist of SEQ ID NO: 858, and the synthetic polyadenylation signal can comprise, consist essentially of, or consist of SEQ ID NO: 860. In some embodiments, the nucleic acid construct is a unidirectional construct.

[0439] In some embodiments, a stuffer sequence can be used to increase the time between when RNA polymerase transcribes the polyA to the time when it transcribes the next splice acceptor. For example, the stuffer sequence can be used between two different polyadenylation signals (e.g., between a BGH polyadenylation signal and a synthetic polyadenylation signal. For example, the stuffer sequence can comprise, consist essentially of, or consist of SEQ ID NO: 861.

[0440] In some embodiments, MAZ elements that cause polymerase pausing are used in combination with a polyadenylation signal (e.g., a BGH polyadenylation signal or an SV40 polyadenylation signal). For example, one or more (e.g., at least 1, at least 2, at least 3, at least 4, or about 1 to about 4, about 2 to about 4, about 3 to about 4, or 1, 2, 3, or 4) MAZ elements can be used in combination with a polyadenylation signal. For example, the MAZ element can comprise, consist essentially of, or consist of SEQ ID NO: 862.

[0441] In some embodiments, unidirectional SV40 late polyadenylation signals are used. The SV40 polyA is bidirectional, but the polyadenylation in the “late” orientation is more efficient than the polyadenylation in the “early” orientation. The unidirectional SV40 late polyadenylation signals described herein are positioned in the “late” orientation, with the polyadenylation signals present in the “early” orientation mutated or inactivated. In some embodiments, each instance of the sequence AATAAA in the reverse strand is mutated in the unidirectional SV40 late polyadenylation signal. For example, the two conserved AATAAA poly(A) signals present in the SV40 “early” poly(A) to AATCAA. In some embodiments, the unidirectional SV40 late polyadenylation signal is at least 95%, at least 96%, at least 97%, at least 98%, or at least 99% identical to the sequence set forth in SEQ ID NO: 859. In some embodiments, the unidirectional SV40 late polyadenylation signal comprises, consists essentially of, or consists of the sequence set forth in SEQ ID NO: 859.

[0442] The unidirectional SV40 late polyadenylation signals can be used in combination with (e.g., in tandem with) one or more additional polyadenylation signals. Examples of transcription terminators that can be used include, for example, the human growth hormone (HGH) polyadenylation signal, the simian virus 40 (SV40) late polyadenylation signal, the rabbit beta-globin polyadenylation signal, the bovine growth hormone (BGH) polyadenylation signal, the phosphoglycerate kinase (PGK) polyadenylation signal, an AOX1 transcription termination sequence, a CYC1 transcription termination sequence, or any transcription termination sequence known to be suitable for regulating gene expression in eukaryotic cells. For example, the unidirectional SV40 late polyadenylation signals can be used in combination with (e.g., in tandem with) a bovine growth hormone (BGH) polyadenylation signal, optionally wherein the BGH polyadenylation signal is upstream of (5′ of) the unidirectional SV40 late polyadenylation signal. In some embodiments, the BGH polyadenylation signal is at least 95%, at least 96%, at least 97%, at least 98%, or at least 99% identical to the sequence set forth in SEQ ID NO: 858. In some embodiments, the BGH polyadenylation signal comprises, consists essentially of, or consists of the sequence set forth in SEQ ID NO: 858. In some embodiments, the combination of the BGH polyadenylation signal and the unidirectional SV40 late polyadenylation signal is at least 95%, at least 96%, at least 97%, at least 98%, or at least 99% identical to the sequence set forth in SEQ ID NO: 902. In some embodiments, the combination of the BGH polyadenylation signal and the unidirectional SV40 late polyadenylation signal comprises, consists essentially of, or consists of the sequence set forth in SEQ ID NO: 902.

[0443] In some embodiments, a stuffer sequence can be used to increase the time between when RNA polymerase transcribes the polyA to the time when it transcribes the next splice acceptor. For example, the stuffer sequence can be used between two different polyadenylation signals (e.g., between a BGH polyadenylation signal and a synthetic polyadenylation signal. For example, the stuffer sequence can comprise, consist essentially of, or consist of SEQ ID NO: 861.

[0444] In some embodiments, MAZ elements that cause polymerase pausing are used in combination with a polyadenylation signal (e.g., a BGH polyadenylation signal or an SV40 polyadenylation signal). For example, one or more (e.g., at least 1, at least 2, at least 3, at least 4, or about 1 to about 4, about 2 to about 4, about 3 to about 4, or 1, 2, 3, or 4) MAZ elements can be used in combination with a polyadenylation signal. For example, the MAZ element can comprise, consist essentially of, or consist of SEQ ID NO: 862.

[0445] The constructs disclosed herein may also comprise splice acceptor sites (e.g., operably linked to the polypeptide of interest coding sequence, such as upstream or 5′ of the polypeptide of interest coding sequence). The splice acceptor site can, for example, comprise NAG or consist of NAG. In a specific example, the splice acceptor is an ALB splice acceptor (e.g., an ALB splice acceptor used in the splicing together of exons 1 and 2 of ALB (i.e., ALB exon 2 splice acceptor)). For example, such a splice acceptor can be derived from the human ALB gene. In another example, the splice acceptor can be derived from the mouse Alb gene (e.g., an ALB splice acceptor used in the splicing together of exons 1 and 2 of mouse Alb (i.e., mouse Alb exon 2 splice acceptor)). In another example, the splice acceptor is a splice acceptor from a gene encoding the polypeptide of interest (e.g., a GAA splice acceptor). For example, such a splice acceptor can be derived from the human GAA gene. Alternatively, such a splice acceptor can be derived from the mouse GAA gene. Additional suitable splice acceptor sites useful in eukaryotes, including artificial splice acceptors, are well-known. See, e.g., Shapiro et al. (1987) Nucleic Acids Res. 15:7155-7174 and Burset et al. (2001) Nucleic Acids Res. 29:255-259, each of which is herein incorporated by reference in its entirety for all purposes. In a specific example, the splice acceptor is a mouse Alb exon 2 splice acceptor. In a specific example, the splice acceptor can comprise, consist essentially of, or consist of SEQ ID NO: 286.

[0446] In some examples, the nucleic acid constructs disclosed herein can be bidirectional constructs, which are described in more detail below. In some examples, the nucleic acid constructs disclosed herein can be unidirectional constructs, which are described in more detail below. Likewise, in some examples, the nucleic acid constructs disclosed herein can be in a vector (e.g., viral vector, such as AAV, or rAAV8) and/or a lipid nanoparticle as described in more detail elsewhere herein.

### A. Polypeptides of Interest

[0447] Any polypeptide of interest may be encoded by the nucleic acid constructs disclosed herein. In one example, the polypeptide of interest is a therapeutic polypeptide (e.g., a polypeptide that is lacking or deficient in a subject). In one example, the polypeptide of interest is an enzyme.

[0448] The polypeptide of interest can be a secreted polypeptide (e.g., a protein that is secreted by the cell and/or is functionally active as a soluble extracellular protein). Alternatively, the polypeptide of interest can be an intracellular polypeptide (e.g., a protein that is not secreted by the cell and is functionally active within the cell, including soluble cytosolic polypeptides).

[0449] The polypeptide of interest can be a wild type polypeptide. Alternatively, the polypeptide of interest can be a variant or mutant polypeptide.

[0450] In one example, the polypeptide of interest is a liver protein (e.g., a protein that is, endogenously produced in the liver and/or functionally active in the liver). In another example, the polypeptide of interest can be a circulating protein that is produced by the liver. In another example, the polypeptide of interest can be a non-liver protein.

[0451] The polypeptide of interest can be an exogenous polypeptide. An “exogenous” polypeptide coding sequence can refer to a coding sequence that has been introduced from an exogenous source to a site within a host cell genome (e.g., at a genomic locus such as a safe harbor locus, including ALB intron 1). That is, the exogenous polypeptide coding sequence is exogenous with respect to its insertion site, and the polypeptide of interest expressed from such an exogenous coding sequence is referred to as an exogenous polypeptide. The exogenous coding sequence can be naturally-occurring or engineered, and can be wild type or a variant. The exogenous coding sequence may include nucleotide sequences other than the sequence that encodes the exogenous polypeptide (e.g., an internal ribosomal entry site). The exogenous coding sequence can be a coding sequence that occurs naturally in the host genome, as a wild type or a variant (e.g., mutant). For example, although the host cell contains the coding sequence of interest (as a wild type or as a variant), the same coding sequence or variant thereof can be introduced as an exogenous source (e.g., for expression at a locus that is highly expressed). The exogenous coding sequence can also be a coding sequence that is not naturally occurring in the host genome, or that expresses an exogenous polypeptide that does not naturally occur in the host genome. An exogenous coding sequence can include an exogenous nucleic acid sequence (e.g., a nucleic acid sequence is not endogenous to the recipient cell), or may be exogenous with respect to its insertion site and/or with respect to its recipient cell.

[0452] In one example, the polypeptide of interest is a factor IX protein. See, e.g., WO 2023/077012 and US 2023-0149563, each of which is herein incorporated by reference in its entirety for all purposes.

[0453] In one example, the polypeptide of interest is a multidomain therapeutic protein comprising a CD63-binding delivery domain linked to or fused to a lysosomal alpha-glucosidase (GAA). See, e.g., PCT/US2023/061858 and U.S. Ser. No. 18/163,698, each of which is herein incorporated by reference in its entirety for all purposes. In one example, the polypeptide of interest is a multidomain therapeutic protein comprising a CD63-binding delivery domain fused to a lysosomal alpha-glucosidase (GAA). In one example, the polypeptide of interest is a multidomain therapeutic protein comprising a TfR-binding delivery domain linked to or fused to a GAA. See, e.g., PCT/US2023/061858 and U.S. Ser. No. 18/163,698, each of which is herein incorporated by reference in its entirety for all purposes. In one example, the polypeptide of interest is a multidomain therapeutic protein comprising a TfR-binding delivery domain fused to a GAA.

[0454] In one example, the polypeptide of interest is a polypeptide associated with a genetic enzyme deficiency. In certain embodiments, the genetic enzyme deficiency results in infantile onset of disease. In certain embodiments, the genetic enzyme deficiency can be, or routinely is, diagnosed with newborn screening. In certain embodiments, the enzyme deficiency may manifest in various severity of disease such that the age of onset may include an infantile onset form of the disease and a later onset form of the disease (e.g., childhood, adolescent, or adult form of onset).

[0455] In one example, the polypeptide of interest is a polypeptide associated with a bleeding disorder, e.g., hemophilia, e.g., hemophilia A or hemophilia B. In certain embodiments, the polypeptide of interest is Factor VIII or Factor IX. In one example, the polypeptide of interest is an enzyme related to inborn errors of metabolism. In one example, the polypeptide of interest is an enzyme related to a lysosomal storage disease.

[0456] In another example, the polypeptide of interest is a multidomain therapeutic protein. A multidomain therapeutic protein as described herein includes a lysosomal alpha-glucosidase (GAA; e.g., to provide GAA enzyme replacement activity) linked to or fused to a delivery domain that provides binding to an internalization effector (a protein that is capable of being internalized into a cell or that otherwise participates in or contributes to retrograde membrane trafficking). Examples of multidomain therapeutic proteins can be found in WO 2013/138400, WO 2017/007796, WO 2017/190079, WO 2017/100467, WO 2018/226861, WO 2019/157224, and WO 2019/222663, each of which is herein incorporated by reference in its entirety for all purposes. For example, the multidomain therapeutic proteins described herein can comprise a CD63-binding delivery domain linked to or fused to a lysosomal alpha-glucosidase (GAA). CD63-binding domains and GAA are described in more detail below. The CD63-binding domain provides binding to the internalization factor CD63. The multidomain therapeutic protein is targeted to the muscle by targeting CD63, which is a rapidly internalizing protein highly expressed in the muscle. In some multidomain therapeutic proteins, the CD63-binding delivery domain is covalently linked to the GAA. The covalent linkage may be any type of covalent bond (i.e., any bond that involved sharing of electrons). In some cases, the covalent bond is a peptide bond between two amino acids, such that the GAA and the CD63-binding delivery domain in whole or in part form a continuous polypeptide chain, as in a fusion protein. In some cases, the GAA portion and the CD63-binding delivery domain portion are directly linked. In other cases, a linker, such as a peptide linker, is used to tether the two portions. Any suitable linker can be used. See Chen et al., “Fusion protein linkers: property, design and functionality,” 65(10) Adv Drug Deliv Rev. 1357-69 (2013). In some cases, a cleavable linker is used. For example, a cathepsin cleavable linker can be inserted between the CD63-binding delivery domain and the GAA to facilitate removal of the CD63-binding delivery domain in the lysosome. In another example, the linker can comprise an amino acid sequence, e.g., about 10 amino acids in length, for example, 1, 2, 3, 4, 5, 6, 7, 8, 8, or 10 repeats of Gly₄Ser (SEQ ID NO: 718). In one example, the linker comprises, consists essentially of, or consists of three such repeats (SEQ ID NO: 828). For example, the coding sequence for the linker can comprise, consist essentially of, or consist of any one of SEQ ID NOS: 830-834 and 854. In another example, the linker comprises, consists essentially of, or consists of two such repeats (SEQ ID NO: 829). For example, the coding sequence for the linker can comprise, consist essentially of, or consist of any one of SEQ ID NOS: 835-841. In another example, the linker comprises, consists essentially of, or consists of one such repeat (SEQ ID NO: 718). For example, the coding sequence for the linker can comprise, consist essentially of, or consist of SEQ ID NO: 842 or 855.

[0457] In a particular multidomain therapeutic protein, the GAA is covalently linked to the C-terminus of the heavy chain of an anti-CD63 antibody or to the C-terminus of the light chain. In another particular multidomain therapeutic protein, the GAA is covalently linked to the N-terminus of the heavy chain of an anti-CD63 antibody or to the N-terminus of the light chain. In another particular embodiment, the GAA is linked to the C-terminus of an anti-CD63 scFv domain.

[0458] As another example, the multidomain therapeutic proteins described herein can comprise a TfR-binding delivery domain linked to or fused to a lysosomal alpha-glucosidase (GAA). TfR-binding domains and GAA are described in more detail below. The TfR-binding domain provides binding to the internalization factor TfR. The multidomain therapeutic protein produced by the liver is targeted the muscle and CNS by targeting TfR, which is expressed in muscle and on brain endothelial cells. Transcytosis of TfR in these cells enables blood-brain-barrier crossing. In some multidomain therapeutic proteins, the TfR-binding delivery domain is covalently linked to the GAA. The covalent linkage may be any type of covalent bond (i.e., any bond that involved sharing of electrons). In some cases, the covalent bond is a peptide bond between two amino acids, such that the GAA and the TfR-binding delivery domain in whole or in part form a continuous polypeptide chain, as in a fusion protein. In some cases, the GAA portion and the TfR-binding delivery domain portion are directly linked. In other cases, a linker, such as a peptide linker, is used to tether the two portions. Any suitable linker can be used. See Chen et al., “Fusion protein linkers: property, design and functionality,” 65(10) Adv Drug Deliv Rev. 1357-69 (2013). In some cases, a cleavable linker is used. For example, a cathepsin cleavable linker can be inserted between the TfR-binding delivery domain and the GAA to facilitate removal of the TfR-binding delivery domain in the lysosome. In another example, the linker can comprise an amino acid sequence, e.g., about 10 amino acids in length, for example, 1, 2, 3, 4, 5, 6, 7, 8, 8, or 10 repeats of Gly₄Ser (SEQ ID NO: 718). In one example, the linker comprises, consists essentially of, or consists of three such repeats (SEQ ID NO: 828). For example, the coding sequence for the linker can comprise, consist essentially of, or consist of any one of SEQ ID NOS: 830-834. In another example, the linker comprises, consists essentially of, or consists of two such repeats (SEQ ID NO: 829). For example, the coding sequence for the linker can comprise, consist essentially of, or consist of any one of SEQ ID NOS: 835-841. In another example, the linker comprises, consists essentially of, or consists of one such repeat (SEQ ID NO: 718). For example, the coding sequence for the linker can comprise, consist essentially of, or consist of SEQ ID NO: 842.

[0459] In a particular multidomain therapeutic protein, the GAA is covalently linked to the C-terminus of the heavy chain of an anti-TfR antibody or to the C-terminus of the light chain. In another particular multidomain therapeutic protein, the GAA is covalently linked to the N-terminus of the heavy chain of an anti-TfR antibody or to the N-terminus of the light chain. In another particular embodiment, the GAA is linked to the C-terminus of an anti-TfR scFv domain.

[0460] In another example, the polypeptide of interest is an antigen-binding protein. See, e.g., WO 2020/206162 and US 2020-0318136, each of which is herein incorporated by reference in its entirety for all purposes. An “antigen-binding protein” as disclosed herein includes any protein that binds to an antigen. Examples of antigen-binding proteins include an antibody, an antigen-binding fragment of an antibody, a multi-specific antibody (e.g., a bi-specific antibody), an scFv, a bis-scFv, a diabody, a triabody, a tetrabody, a V-NAR, a VHH, a VL, a F(ab), a F(ab)₂, a DVD (dual variable domain antigen-binding protein), an SVD (single variable domain antigen-binding protein), a bispecific T-cell engager (BiTE), or a Davisbody (U.S. Pat. No. 8,586,713, herein incorporated by reference herein in its entirety for all purposes).

[0461] An antigen-binding protein or antibody can be, for example, a neutralizing antigen-binding protein or antibody or a broadly neutralizing antigen-binding protein or antibody. A neutralizing antibody is an antibody that defends a cell from an antigen or infectious body by neutralizing any effect it has biologically. Broadly-neutralizing antibodies (bNAbs) affect multiple strains of a particular bacteria or virus. For example, broadly neutralizing antibodies can focus on conserved functional targets, attacking a vulnerable site on conserved bacterial or viral proteins (e.g., a vulnerable site on the influenza viral protein hemagglutinin). Antibodies developed by the immune system upon infection or vaccination tend to focus on easily accessible loops on the bacterial or viral surface, which often have great sequence and conformational variability. This is a problem for two reasons: the bacteria or virus population can quickly evade these antibodies, and the antibodies are attacking portions of the protein that are not essential for function. Broadly neutralizing antibodies—termed “broadly” because they attack many strains of the bacteria or virus, and “neutralizing” because they attack key functional sites in the bacteria or virus and block infection—can overcome these problems. Unfortunately, however, these antibodies usually come too late and do not provide effective protection from the disease.

[0462] The antigen-binding proteins disclosed herein can target any antigen. The term “antigen” refers to a substance, whether an entire molecule or a domain within a molecule, which is capable of eliciting production of antibodies with binding specificity to that substance. The term antigen also includes substances, which in wild type host organisms would not elicit antibody production by virtue of self-recognition, but can elicit such a response in a host animal with appropriate genetic engineering to break immunological tolerance.

[0463] As one example, the targeted antigen can be a disease-associated antigen. The term “disease-associated antigen” refers to an antigen whose presence is correlated with the occurrence or progression of a particular disease. For example, the antigen can be in a disease-associated protein (i.e., a protein whose expression is correlated with the occurrence or progression of the disease). Optionally, a disease-associated protein can be a protein that is expressed in a particular type of disease but is not normally expressed in healthy adult tissue (i.e., a protein with disease-specific expression or disease-restricted expression). However, a disease-associated protein does not have to have disease-specific or disease-restricted expression.

[0464] As one example, a disease-associated antigen can be a cancer-associated antigen. The term “cancer-associated antigen” refers to an antigen whose presence is correlated with the occurrence or progression of one or more types of cancer. For example, the antigen can be in a cancer-associated protein (i.e., a protein whose expression is correlated with the occurrence or progression of one or more types of cancer). For example, a cancer-associated protein can be an oncogenic protein (i.e., a protein with activity that can contribute to cancer progression, such as proteins that regulate cell growth), or it can be a tumor-suppressor protein (i.e., a protein that typically acts to alleviate the potential for cancer formation, such as through negative regulation of the cell cycle or by promoting apoptosis). Optionally, a cancer-associated protein can be a protein that is expressed in a particular type of cancer but is not normally expressed in healthy adult tissue (i.e., a protein with cancer-specific expression, cancer-restricted expression, tumor-specific expression, or tumor-restricted expression). However, a cancer-associated protein does not have to have cancer-specific, cancer-restricted, tumor-specific, or tumor-restricted expression. Examples of proteins that are considered cancer-specific or cancer-restricted are cancer testis antigens or oncofetal antigens. Cancer testis antigens (CTAs) are a large family of tumor-associated antigens expressed in human tumors of different histological origin but not in normal tissue, except for male germ cells. In cancer, these developmental antigens can be re-expressed and can serve as a locus of immune activation. Oncofetal antigens (OFAs) are proteins that are typically present only during fetal development but are found in adults with certain kinds of cancer.

[0465] As another example, a disease-associated antigen can be an infectious-disease-associated antigen. The term “infectious-disease-associated antigen” refers to an antigen whose presence is correlated with the occurrence or progression of a particular infectious disease. For example, the antigen can be in an infectious-disease-associated protein (i.e., a protein whose expression is correlated with the occurrence or progression of the infectious disease). Optionally, an infectious-disease-associated protein can be a protein that is expressed in a particular type of infectious disease but is not normally expressed in healthy adult tissue (i.e., a protein with infectious-disease-specific expression or infectious-disease-restricted expression). However, an infectious-disease-associated protein does not have to have infectious-disease-specific or infectious-disease-restricted expression. For example, the antigen can be a viral antigen or a bacterial antigen. Such antigens include, for example, molecular structures on the surface of viruses or bacteria (e.g., viral proteins or bacterial proteins) that are recognized by the immune system and are capable of triggering an immune response.

[0466] Examples of viral antigens include antigens within proteins expressed by the Zika virus or influenza (flu) viruses. Zika is a virus spread to people primarily through the bite of an infected Aedes species mosquito (Ae. aegypti and Ae. Albopictus). Zika virus infection during pregnancy can cause microcephaly and other severe brain defects. For example, a Zika antigen can be, but is not limited to, an antigen within a Zika virus envelope (Env) protein. Influenza virus is a virus that causes an infectious disease called influenza (commonly known as “the flu”). Three types of influenza viruses affect people, called Type A, Type B, and Type C. An influenza antigen can be, but is not limited to, an antigen within the hemagglutinin protein. Viral antigens and bacterial antigens also include antigens on other viruses and other bacteria. Examples of antibodies targeting influenza hemagglutinin are provided, e.g., in WO 2016/100807, herein incorporated by reference in its entirety for all purposes.

[0467] Examples of bacterial antigens include antigens within proteins expressed by Pseudomonas aeruginosa (e.g., an antigen within PcrV, which is a type III virulence system translocating protein). Pseudomonas aeruginosa is an opportunistic bacterial pathogen that causes fatal acute lung infections in critically ill individuals. Its pathogenesis is associated with bacterial virulence conferred by the type III secretion system (TTSS), through which P. aeruginosa causes necrosis of the lung epithelium and disseminates into the circulation, resulting in bacteremia, sepsis, and mortality. TTSS allows P. aeruginosa to directly translocate cytotoxins into eukaryotic cells, inducing cell death. The P. aeruginosa V-antigen PcrV, a homolog of the Yersinia V-antigen LcrV, is an indispensable contributor to TTS toxin translocation.

[0468] The antigen-binding protein can be a single-chain antigen-binding protein such as an scFv. Alternatively, the antigen-binding protein is not a single-chain antigen-binding protein. For example, the antigen-binding protein can include separate light and heavy chains. The heavy chain coding sequence can be upstream of the light chain coding sequence, or the light chain coding sequence can be upstream of the heavy chain coding sequence. In one specific example, the heavy chain coding sequence is upstream of the light chain coding sequence. For example, the heavy chain coding sequence can comprise V_{H}, D_{H}, and J_{H} segments, and the light chain coding sequence can comprise light chain V_{L} and light chain J_{L} gene segments. The antigen-binding protein coding sequence can be operably linked to an exogenous promoter in the nucleic acid construct, or the nucleic acid construct can be designed such that the antigen-binding protein coding sequence will be operably linked to an endogenous promoter at the genomic locus or safe harbor locus once it is genomically integrated. In one specific example, the nucleic acid construct can be designed such that the antigen-binding protein coding sequence will be operably linked to an endogenous promoter at the genomic locus or safe harbor locus once it is genomically integrated. Likewise, the antigen-binding protein coding sequence in the nucleic acid construct can include an exogenous signal sequence for secretion and/or the nucleic acid construct can be designed so that the antigen-binding protein coding sequence will be operably linked to an endogenous signal sequence at the genomic locus or safe harbor locus once it is genomically integrated. In one example, the nucleic acid construct can be designed so that the antigen-binding protein coding sequence will be operably linked to an endogenous signal sequence at the genomic locus or safe harbor locus once it is genomically integrated. In a specific example, the antigen-binding protein comprises separate light and heavy chains, and the nucleic acid construct is designed such that the coding sequence for one chain will be operably linked to an endogenous signal sequence at the genomic locus or safe harbor locus once it is genomically integrated and the coding sequence for the other chain is operably linked to a separate exogenous signal sequence. In a specific example, the antigen-binding protein comprises separate light and heavy chains, and the nucleic acid construct is designed such that the whichever chain coding sequence is upstream in the nucleic acid construct will be operably linked to an endogenous signal sequence at the genomic locus or safe harbor locus once it is genomically integrated, and an exogenous signal sequence is operably linked to the whichever chain coding sequence is downstream in the exogenous donor nucleic acid. Alternatively, the nucleic acid construct can be designed such that the coding sequences for both chains will be operably linked to an endogenous signal sequence at the genomic locus or safe harbor locus once it is genomically integrated, or the coding sequence for both chains can be operably linked to the same exogenous signal sequence or the coding sequence for each chain can be operably linked to separate exogenous signal sequences.

[0469] Signal sequences (i.e., N-terminal signal sequences) mediate targeting of nascent secretory and membrane proteins to the endoplasmic reticulum (ER) in a signal recognition particle (SRP)-dependent manner. Usually, signal sequences are cleaved off co-translationally so that signal peptides and mature proteins are generated. Examples of exogenous signal sequences or signal peptides that can be used include, for example, the signal sequence/peptide from mouse albumin, human albumin, mouse ROR1, human ROR1, human azurocidin, Cricetulus griseus Ig kappa chain V III region MOPC 63 like, and human Ig kappa chain V III region VG. Any other known signal sequence/peptide can also be used.

[0470] One or more of the nucleic acids in the antigen-binding-protein coding sequence (e.g., a heavy chain coding sequence and a light chain coding sequence) can be together in a multicistronic expression construct. For example, a nucleic acid encoding a heavy chain and a light chain can be together in a bicistronic expression construct. Multicistronic expression vectors simultaneously express two or more separate proteins from the same mRNA (i.e., a transcript produced from the same promoter). Suitable strategies for multicistronic expression of proteins include, for example, the use of a 2A peptide and the use of an internal ribosome entry site (IRES). As one example, such multicistronic vectors can use one or more internal ribosome entry sites (IRES) to allow for initiation of translation from an internal region of an mRNA. As another example, such multicistronic vectors can use one or more 2A peptides. These peptides are small “self-cleaving” peptides, generally having a length of 18-22 amino acids and produce equimolar levels of multiple genes from the same mRNA. Ribosomes skip the synthesis of a glycyl-prolyl peptide bond at the C-terminus of a 2A peptide, leading to the “cleavage” between a 2A peptide and its immediate downstream peptide. See, e.g., Kim et al. (2011) PLoS One 6(4): e18556, herein incorporated by reference in its entirety for all purposes. The “cleavage” occurs between the glycine and proline residues found on the C-terminus, meaning the upstream cistron will have a few additional residues added to the end, while the downstream cistron will start with the proline. As a result, the “cleaved-off” downstream peptide has proline at its N-terminus. 2A-mediated cleavage is a universal phenomenon in all eukaryotic cells. 2A peptides have been identified from picornaviruses, insect viruses and type C rotaviruses. See, e.g., Szymczak et al. (2005) Expert Opin Biol Ther 5:627-638, herein incorporated by reference in its entirety for all purposes. Examples of 2A peptides that can be used include Thosea asigna virus 2A (T2A); porcine teschovirus-1 2A (P2A); equine rhinitis A virus (ERAV) 2A (E2A); and FMDV 2A (F2A). GSG residues can be added to the 5′ end of any of these peptides to improve cleavage efficiency.

[0471] In some nucleic acid constructs, a nucleic acid encoding a furin cleavage site is included between the light chain coding sequence and the heavy chain coding sequence. In some nucleic acid construct, a nucleic acid encoding a linker (e.g., GSG) is included between the light chain coding sequence and the heavy chain coding sequence (e.g., directly upstream of the 2A peptide coding sequence). For example, a furin cleavage site can be included upstream of a 2A peptide, with both the furin cleavage site and the 2A peptide being located between the light chain and the heavy chain (i.e., upstream chain-furin cleavage site-2A peptide-downstream chain). During translation, a first cleavage event will occur at the 2A peptide sequence. However, most of the 2A peptide will remain attached as a remnant to the C-terminus of the upstream chain (e.g., light chain if the light chain is upstream of the heavy chain, or heavy chain if the heavy chain is upstream of the light chain), with one amino acid added to the N-terminus of the downstream chain (or the N-terminus of a signal sequence, if a signal sequence is included upstream of the downstream chain). A second cleavage event, initiated at the furin cleavage site, yields the upstream chain without the 2A remnants in order to obtain a more native heavy chain or light chain by post-translational processing.

### (1) Factor IX

[0472] Coagulation factor IX (FIX; also known as Christmas factor or plasma thromboplastin component or PTC) is encoded by factor 9 (F9) and is a 415-amino acid serine protease synthesized in the liver. It is a vitamin K-dependent plasma protein that participates in the intrinsic pathway of blood coagulation by converting factor X to its active form in the presence of Ca²⁺ ions, phospholipids, and factor VIIIa. The plasma concentration of FIX is about 50 times that of factor VIII, and FIX has a half-life of about 24 hours.

[0473] The FIX expressed from the compositions and methods disclosed herein can be any wild type or variant FIX. In one example, the FIX is a human FIX protein. Human FIX is assigned UniProt reference number P00740. An exemplary amino acid sequence for human Factor IX is assigned NCBI Accession No. NP_000124.1 and is set forth in SEQ ID NO: 57. An exemplary human F9 mRNA (cDNA) sequence is assigned NCBI Accession No. NM_000133.4 and is set forth in SEQ ID NO: 58. An exemplary human F9 coding sequence is assigned CCDS ID CCDS14666.1 and is set forth in SEQ ID NO: 59.

[0474] In some examples, the FIX (e.g., human FIX) is a wild type FIX (e.g., wild type human FIX) sequence or a fragment thereof. For example, the FIX can be a fragment comprising the mature FIX amino acid sequence (i.e., the FIX sequence after removal of the signal peptide and propeptide), or a fragment comprising the mature FIX amino acid sequence and a portion of the propeptide. In a specific example, the FIX can comprise SEQ ID NO: 97 or can be at least 90%, at least 91%, at least 92%, at least 93%, at least 94%, at least 95%, at least 96%, at least 97%, at least 98%, at least 99%, or at least 99.5% identical to SEQ ID NO: 97.

[0475] In some examples, the FIX (e.g., human FIX) is not a hyperactive or hyperfunctional variant of FIX (i.e., the FIX does not have one or more mutations that increase the activity of the variant FIX relative to wild type). In other examples, the FIX (e.g., human FIX) is not a FVIII-independent variant of FIX (i.e., the FIX does not have one or more mutations that allow the variant FIX to activate coagulation in the absence of its cofactor, factor VIII). In other examples, the FIX (e.g., human FIX) is not a hyperactive or hyperfunctional variant of FIX and is not a FVIII-independent variant of FIX.

[0476] In other examples, the FIX (e.g., human FIX) is a variant FIX (e.g., a variant human FIX) or a fragment thereof. For example, the variant FIX or fragment thereof can comprise one or more mutations. In one example, the variant FIX or fragment thereof can have one or more mutations that increase the activity of the variant FIX (hyperactive or hyperfunctional) relative to wild type, such as an amino acid substitution in position R338 (e.g., R338A or R338L) and/or an amino acid substitution at position S377 (e.g., S377W). See, e.g., US 2019/0017039 and US 2020/0172892, each of which is herein incorporated by reference in its entirety for all purposes. The numbering referred to herein is the standard FIX numbering, with position 1 being the tyrosine at amino acid 47 in SEQ ID NO: 57 (i.e., the first amino acid of the mature FIX protein following the signal peptide and propeptide in SEQ ID NO: 57). Further examples of variant FIX comprise an amino acid at residue 338 chosen from alanine, leucine, valine, isoleucine, phenylalanine, tryptophan, methionine, serine, and threonine. Further FIX variants comprise an amino acid at residue 338 chosen from leucine, cysteine, aspartic acid, glutamic acid, histidine, lysine, asparagine, glutamine, or tyrosine. In another example, the variant FIX or fragment thereof can have one or more mutations that allow the variant FIX to activate coagulation in the absence of its cofactor, factor VIII, such as an amino acid substitution at position L6, V181, E185, Y259, A261, K265, Y345, 1383, E388, or a combination thereof (e.g., L6F, V181I, E185D, E185S, Y259F, A261K, K265A, K265T, Y345F, I383V, E188G, or a combination thereof). See, e.g., U.S. Pat. Nos. 10,125,357, 10,000,748, 10,604,749, US 2008/0214462, U.S. Pat. Nos. 8,022,187, and 8,513,386, each of which is herein incorporated by reference in its entirety for all purposes. In another example, the variant FIX or fragment thereof can have one or more mutations that allow the variant FIX to activate coagulation in the absence of its cofactor, factor VIII, such as an amino acid substitution at position V181, K265, 1383, or a combination thereof or at position L6, V181, K265, 1383, E185, or a combination thereof (e.g., an L6F mutation, a V181I mutation, a K265A or K265T mutation, an I383V mutation, an E185D mutation, or a combination thereof such as L6F/V181I/K265A/I383V, L6F/V181I/K265T/I383V, V181I/K265A/I383V/E185D, V181I/K265T/1383V/E185D, V181I/K265A/I383V/E185S, or V181I/K265T/I383V/E185S, or a V181I mutation, a K265A or K265T mutation, an I383V mutation, or a combination thereof such as V181I/K265A/I383V or V181I/K265T/I383V). In another example, the variant FIX or fragment thereof can have one or more mutations that increase the activity of the variant FIX relative to wild type and one or more mutations that allow the variant FIX to activate coagulation in the absence of its cofactor, factor VIII.

[0477] The FIX coding sequences in the constructs disclosed herein may include wild type FIX coding sequences without any modifications. The FIX coding sequences in the constructs disclosed herein may include one or more modifications such as codon optimization (e.g., to human codons), depletion of CpG dinucleotides, mutation of cryptic splice sites, addition of one or more glycosylation sites, or any combination thereof. CpG dinucleotides in a construct can limit the therapeutic utility of the construct. First, unmethylated CpG dinucleotides can interact with host toll-like receptor-9 (TLR-9) to stimulate innate, proinflammatory immune responses. Second, once the CpG dinucleotides become methylated, they can result in the suppression of transgene expression coordinated by methyl-CpG binding proteins. Cryptic splice sites are sequences in a pre-messenger RNA that are not normally used as splice sites, but that can be activated, for example, by mutations that either inactivate canonical splice sites or create splice sites where one did not exist before. Accurate splice site selection is critical for successful gene expression, and removal of cryptic splice sites can favor use of the normal or intended splice site.

[0478] In one example, a FIX coding sequence in a construct disclosed herein has one or more cryptic splice sites mutated or removed. In another example, a FIX coding sequence in a construct disclosed herein has all identified cryptic splice sites mutated or removed. In another example, a FIX coding sequence in a construct disclosed herein has one or more CpG dinucleotides removed (i.e., is CpG depleted). In another example, a FIX coding sequence in a construct disclosed herein has all but one CpG dinucleotides removed. In another example, a FIX coding sequence in a construct disclosed herein has all CpG dinucleotides removed (i.e., is fully CpG depleted). In another example, a FIX coding sequence in a construct disclosed herein is codon optimized (e.g., codon optimized for expression in a human or mammal). In a specific example, a FIX coding sequence in a construct disclosed herein has one or more CpG dinucleotides removed (i.e., is CpG depleted) and has one or more cryptic splice sites mutated or removed. In another specific example, a FIX coding sequence in a construct disclosed herein has all but one CpG dinucleotides removed (e.g., introducing one CpG to mutate a cryptic splice site) and has one or more or all identified cryptic splice sites mutated or removed. In another specific example, a FIX coding sequence in a construct disclosed herein has one or more CpG dinucleotides removed (i.e., is CpG depleted) and is codon optimized (e.g., codon optimized for expression in a human or mammal). In another specific example, a FIX coding sequence in a construct disclosed herein has all CpG dinucleotides removed (i.e., is fully CpG depleted) and is codon optimized (e.g., codon optimized for expression in a human or mammal).

[0479] Various codon optimized FIX coding sequences are provided. See, e.g., WO 2023/077012 and US 2023-0149563, each of which is herein incorporated by reference in its entirety for all purposes. The FIX coding sequence can be, for example, CpG-depleted (e.g., fully CpG depleted) and/or codon optimized (e.g., CpG depleted (e.g., fully CpG-depleted) and codon optimized). In one example, the FIX coding sequence is (or comprises a sequence) at least 90%, at least 91%, at least 92%, at least 93%, at least 94%, at least 95%, at least 96%, at least 97%, at least 98%, at least 99%, at least 99.5%, or 100% identical to any one of SEQ ID NOS: 64-73. In another example, the FIX coding sequence is (or comprises a sequence) at least 95%, at least 96%, at least 97%, at least 98%, at least 99%, at least 99.5%, or 100% identical to any one of SEQ ID NOS: 64-73. In another example, the FIX coding sequence is (or comprises a sequence) at least 99%, at least 99.5%, or 100% identical to any one of SEQ ID NOS: 64-73. In another example, the FIX coding sequence comprises the sequence set forth in any one of SEQ ID NOS: 64-73. In another example, the FIX coding sequence consists essentially of the sequence set forth in any one of SEQ ID NOS: 64-73. In another example, the FIX coding sequence consists of the sequence set forth in any one of SEQ ID NOS: 64-73. Optionally, the FIX coding sequence encodes a FIX protein (or a FIX protein comprising a sequence) at least 90%, at least 91%, at least 92%, at least 93%, at least 94%, at least 95%, at least 96%, at least 97%, at least 98%, at least 99%, at least 99.5%, or 100% identical to SEQ ID NO: 97 (and, e.g., retaining the activity of native FIX). Optionally, the FIX coding sequence encodes a FIX protein (or a FIX protein comprising a sequence) at least 95%, at least 96%, at least 97%, at least 98%, at least 99%, at least 99.5%, or 100% identical to SEQ ID NO: 97 (and, e.g., retaining the activity of native FIX). Optionally, the FIX coding sequence in the above examples encodes a FIX protein (or a FIX protein comprising a sequence) at least 99%, at least 99.5%, or 100% identical to SEQ ID NO: 97 (and, e.g., retaining the activity of native FIX). Optionally, the FIX coding sequence in the above examples encodes a FIX protein comprising the sequence set forth in SEQ ID NO: 97. Optionally, the FIX coding sequence in the above examples encodes a FIX protein consisting essentially of the sequence set forth in SEQ ID NO: 97. Optionally, the FIX coding sequence in the above examples encodes a FIX protein consisting of the sequence set forth in SEQ ID NO: 97.

[0480] In one example, the FIX coding sequence is (or comprises a sequence) at least 90%, at least 91%, at least 92%, at least 93%, at least 94%, at least 95%, at least 96%, at least 97%, at least 98%, at least 99%, at least 99.5%, or 100% identical to any one of SEQ ID NOS: 66-73. In another example, the FIX coding sequence is (or comprises a sequence) at least 95%, at least 96%, at least 97%, at least 98%, at least 99%, at least 99.5%, or 100% identical to any one of SEQ ID NOS: 66-73. In another example, the FIX coding sequence is (or comprises a sequence) at least 99%, at least 99.5%, or 100% identical to any one of SEQ ID NOS: 66-73. In another example, the FIX coding sequence comprises the sequence set forth in any one of SEQ ID NOS: 66-73. In another example, the FIX coding sequence consists essentially of the sequence set forth in any one of SEQ ID NOS: 66-73. In another example, the FIX coding sequence consists of the sequence set forth in any one of SEQ ID NOS: 66-73. The FIX coding sequence can be, for example, CpG-depleted (e.g., fully CpG-depleted) and/or codon optimized. For example, the FIX coding sequence can be CpG depleted (e.g., fully CpG-depleted) and codon optimized. Optionally, the FIX coding sequence encodes a FIX protein (or a FIX protein comprising a sequence) at least 90%, at least 91%, at least 92%, at least 93%, at least 94%, at least 95%, at least 96%, at least 97%, at least 98%, at least 99%, at least 99.5%, or 100% identical to SEQ ID NO: 97 (and, e.g., retaining the activity of native FIX). Optionally, the FIX coding sequence encodes a FIX protein (or a FIX protein comprising a sequence) at least 95%, at least 96%, at least 97%, at least 98%, at least 99%, at least 99.5%, or 100% identical to SEQ ID NO: 97 (and, e.g., retaining the activity of native FIX). Optionally, the FIX coding sequence in the above examples encodes a FIX protein (or a FIX protein comprising a sequence) at least 99%, at least 99.5%, or 100% identical to SEQ ID NO: 97 (and, e.g., retaining the activity of native FIX). Optionally, the FIX coding sequence in the above examples encodes a FIX protein comprising the sequence set forth in SEQ ID NO: 97. Optionally, the FIX coding sequence in the above examples encodes a FIX protein consisting essentially of the sequence set forth in SEQ ID NO: 97. Optionally, the FIX coding sequence in the above examples encodes a FIX protein consisting of the sequence set forth in SEQ ID NO: 97.

[0481] In one example, the FIX coding sequence is (or comprises a sequence) at least 90%, at least 91%, at least 92%, at least 93%, at least 94%, at least 95%, at least 96%, at least 97%, at least 98%, at least 99%, at least 99.5%, or 100% identical to SEQ ID NO: 68 or 67. In another example, the FIX coding sequence is (or comprises a sequence) at least 95%, at least 96%, at least 97%, at least 98%, at least 99%, at least 99.5%, or 100% identical to SEQ ID NO: 68 or 67. In another example, the FIX coding sequence is (or comprises a sequence) at least 99%, at least 99.5%, or 100% identical to SEQ ID NO: 68 or 67. In another example, the FIX coding sequence comprises the sequence set forth in SEQ ID NO: 68 or 67. In another example, the FIX coding sequence consists essentially of the sequence set forth in SEQ ID NO: 68 or 67. In another example, the FIX coding sequence consists of the sequence set forth in SEQ ID NO: 68 or 67. The FIX coding sequence can be, for example, CpG-depleted (e.g., fully CpG-depleted) and/or codon optimized. For example, the FIX coding sequence can be CpG depleted (e.g., fully CpG-depleted) and codon optimized. Optionally, the FIX coding sequence encodes a FIX protein (or a FIX protein comprising a sequence) at least 90%, at least 91%, at least 92%, at least 93%, at least 94%, at least 95%, at least 96%, at least 97%, at least 98%, at least 99%, at least 99.5%, or 100% identical to SEQ ID NO: 97 (and, e.g., retaining the activity of native FIX). Optionally, the FIX coding sequence encodes a FIX protein (or a FIX protein comprising a sequence) at least 95%, at least 96%, at least 97%, at least 98%, at least 99%, at least 99.5%, or 100% identical to SEQ ID NO: 97 (and, e.g., retaining the activity of native FIX). Optionally, the FIX coding sequence in the above examples encodes a FIX protein (or a FIX protein comprising a sequence) at least 99%, at least 99.5%, or 100% identical to SEQ ID NO: 97 (and, e.g., retaining the activity of native FIX). Optionally, the FIX coding sequence in the above examples encodes a FIX protein comprising the sequence set forth in SEQ ID NO: 97. Optionally, the FIX coding sequence in the above examples encodes a FIX protein consisting essentially of the sequence set forth in SEQ ID NO: 97. Optionally, the FIX coding sequence in the above examples encodes a FIX protein consisting of the sequence set forth in SEQ ID NO: 97.

[0482] In one example, the FIX coding sequence is (or comprises a sequence) at least 90%, at least 91%, at least 92%, at least 93%, at least 94%, at least 95%, at least 96%, at least 97%, at least 98%, at least 99%, at least 99.5%, or 100% identical to SEQ ID NO: 68. In another example, the FIX coding sequence is (or comprises a sequence) at least 90%, at least 91%, at least 92%, at least 93%, at least 94%, at least 95%, at least 96%, at least 97%, at least 98%, at least 99%, at least 99.5%, or 100% identical to SEQ ID NO: 68 and encodes a FIX protein (or a FIX protein comprising a sequence) at least 99%, at least 99.5%, or 100% identical to SEQ ID NO: 97. In another example, the FIX coding sequence is (or comprises a sequence) at least 90%, at least 91%, at least 92%, at least 93%, at least 94%, at least 95%, at least 96%, at least 97%, at least 98%, at least 99%, at least 99.5%, or 100% identical to SEQ ID NO: 68 and encodes a FIX protein comprising the sequence set forth in SEQ ID NO: 97. In another example, the FIX coding sequence is (or comprises a sequence) at least 95%, at least 96%, at least 97%, at least 98%, at least 99%, at least 99.5%, or 100% identical to SEQ ID NO: 68. In another example, the FIX coding sequence is (or comprises a sequence) at least 95%, at least 96%, at least 97%, at least 98%, at least 99%, at least 99.5%, or 100% identical to SEQ ID NO: 68 and encodes a FIX protein (or a FIX protein comprising a sequence) at least 99%, at least 99.5%, or 100% identical to SEQ ID NO: 97. In another example, the FIX coding sequence is (or comprises a sequence) at least 95%, at least 96%, at least 97%, at least 98%, at least 99%, at least 99.5%, or 100% identical to SEQ ID NO: 68 and encodes a FIX protein comprising the sequence set forth in SEQ ID NO: 97. In another example, the FIX coding sequence is (or comprises a sequence) at least 99%, at least 99.5%, or 100% identical to SEQ ID NO: 68. In another example, the FIX coding sequence is (or comprises a sequence) at least 99%, at least 99.5%, or 100% identical to SEQ ID NO: 68 and encodes a FIX protein (or a FIX protein comprising a sequence) at least 99%, at least 99.5%, or 100% identical to SEQ ID NO: 97. In another example, the FIX coding sequence is (or comprises a sequence) at least 99%, at least 99.5%, or 100% identical to SEQ ID NO: 68 and encodes a FIX protein comprising the sequence set forth in SEQ ID NO: 97. In another example, the FIX coding sequence comprises the sequence set forth in SEQ ID NO: 68. In another example, the FIX coding sequence consists essentially of the sequence set forth in SEQ ID NO: 68. In another example, the FIX coding sequence consists of the sequence set forth in SEQ ID NO: 68. The FIX coding sequence can be, for example, CpG-depleted (e.g., fully CpG-depleted) and/or codon optimized. For example, the FIX coding sequence can be CpG depleted (e.g., fully CpG-depleted) and codon optimized. Optionally, the FIX coding sequence encodes a FIX protein (or a FIX protein comprising a sequence) at least 90%, at least 91%, at least 92%, at least 93%, at least 94%, at least 95%, at least 96%, at least 97%, at least 98%, at least 99%, at least 99.5%, or 100% identical to SEQ ID NO: 97 (and, e.g., retaining the activity of native FIX). Optionally, the FIX coding sequence encodes a FIX protein (or a FIX protein comprising a sequence) at least 95%, at least 96%, at least 97%, at least 98%, at least 99%, at least 99.5%, or 100% identical to SEQ ID NO: 97 (and, e.g., retaining the activity of native FIX). Optionally, the FIX coding sequence in the above examples encodes a FIX protein (or a FIX protein comprising a sequence) at least 99%, at least 99.5%, or 100% identical to SEQ ID NO: 97 (and, e.g., retaining the activity of native FIX). Optionally, the FIX coding sequence in the above examples encodes a FIX protein comprising the sequence set forth in SEQ ID NO: 97. Optionally, the FIX coding sequence in the above examples encodes a FIX protein consisting essentially of the sequence set forth in SEQ ID NO: 97. Optionally, the FIX coding sequence in the above examples encodes a FIX protein consisting of the sequence set forth in SEQ ID NO: 97.

[0483] In one example, the FIX coding sequence is (or comprises a sequence) at least 90%, at least 91%, at least 92%, at least 93%, at least 94%, at least 95%, at least 96%, at least 97%, at least 98%, at least 99%, at least 99.5%, or 100% identical to SEQ ID NO: 67. In another example, the FIX coding sequence is (or comprises a sequence) at least 90%, at least 91%, at least 92%, at least 93%, at least 94%, at least 95%, at least 96%, at least 97%, at least 98%, at least 99%, at least 99.5%, or 100% identical to SEQ ID NO: 67 and encodes a FIX protein (or a FIX protein comprising a sequence) at least 99%, at least 99.5%, or 100% identical to SEQ ID NO: 97. In another example, the FIX coding sequence is (or comprises a sequence) at least 90%, at least 91%, at least 92%, at least 93%, at least 94%, at least 95%, at least 96%, at least 97%, at least 98%, at least 99%, at least 99.5%, or 100% identical to SEQ ID NO: 67 and encodes a FIX protein comprising the sequence set forth in SEQ ID NO: 97. In another example, the FIX coding sequence is (or comprises a sequence) at least 95%, at least 96%, at least 97%, at least 98%, at least 99%, at least 99.5%, or 100% identical to SEQ ID NO: 67. In another example, the FIX coding sequence is (or comprises a sequence) at least 95%, at least 96%, at least 97%, at least 98%, at least 99%, at least 99.5%, or 100% identical to SEQ ID NO: 67 and encodes a FIX protein (or a FIX protein comprising a sequence) at least 99%, at least 99.5%, or 100% identical to SEQ ID NO: 97. In another example, the FIX coding sequence is (or comprises a sequence) at least 95%, at least 96%, at least 97%, at least 98%, at least 99%, at least 99.5%, or 100% identical to SEQ ID NO: 67 and encodes a FIX protein comprising the sequence set forth in SEQ ID NO: 97. In another example, the FIX coding sequence is (or comprises a sequence) at least 99%, at least 99.5%, or 100% identical to SEQ ID NO: 67. In another example, the FIX coding sequence is (or comprises a sequence) at least 99%, at least 99.5%, or 100% identical to SEQ ID NO: 67 and encodes a FIX protein (or a FIX protein comprising a sequence) at least 99%, at least 99.5%, or 100% identical to SEQ ID NO: 97. In another example, the FIX coding sequence is (or comprises a sequence) at least 99%, at least 99.5%, or 100% identical to SEQ ID NO: 67 and encodes a FIX protein comprising the sequence set forth in SEQ ID NO: 97. In another example, the FIX coding sequence comprises the sequence set forth in SEQ ID NO: 67. In another example, the FIX coding sequence consists essentially of the sequence set forth in SEQ ID NO: 67. In another example, the FIX coding sequence consists of the sequence set forth in SEQ ID NO: 67. The FIX coding sequence can be, for example, CpG-depleted (e.g., fully CpG-depleted) and/or codon optimized. For example, the FIX coding sequence can be CpG depleted (e.g., fully CpG-depleted) and codon optimized. Optionally, the FIX coding sequence encodes a FIX protein (or a FIX protein comprising a sequence) at least 90%, at least 91%, at least 92%, at least 93%, at least 94%, at least 95%, at least 96%, at least 97%, at least 98%, at least 99%, at least 99.5%, or 100% identical to SEQ ID NO: 97 (and, e.g., retaining the activity of native FIX). Optionally, the FIX coding sequence encodes a FIX protein (or a FIX protein comprising a sequence) at least 95%, at least 96%, at least 97%, at least 98%, at least 99%, at least 99.5%, or 100% identical to SEQ ID NO: 97 (and, e.g., retaining the activity of native FIX). Optionally, the FIX coding sequence in the above examples encodes a FIX protein (or a FIX protein comprising a sequence) at least 99%, at least 99.5%, or 100% identical to SEQ ID NO: 97 (and, e.g., retaining the activity of native FIX). Optionally, the FIX coding sequence in the above examples encodes a FIX protein comprising the sequence set forth in SEQ ID NO: 97. Optionally, the FIX coding sequence in the above examples encodes a FIX protein consisting essentially of the sequence set forth in SEQ ID NO: 97. Optionally, the FIX coding sequence in the above examples encodes a FIX protein consisting of the sequence set forth in SEQ ID NO: 97.

[0484] Various native and optimized native FIX coding sequences are also provided. In one example, the FIX coding sequence is (or comprises a sequence) at least 90%, at least 91%, at least 92%, at least 93%, at least 94%, at least 95%, at least 96%, at least 97%, at least 98%, at least 99%, at least 99.5%, or 100% identical to any one of SEQ ID NOS: 60-63. In another example, the FIX coding sequence is (or comprises a sequence) at least 95%, at least 96%, at least 97%, at least 98%, at least 99%, at least 99.5%, or 100% identical to any one of SEQ ID NOS: 60-63. In another example, the FIX coding sequence is (or comprises a sequence) at least 99%, at least 99.5%, or 100% identical to any one of SEQ ID NOS: 60-63. In another example, the FIX coding sequence comprises the sequence set forth in any one of SEQ ID NOS: 60-63. In another example, the FIX coding sequence consists essentially of the sequence set forth in any one of SEQ ID NOS: 60-63. In another example, the FIX coding sequence consists of the sequence set forth in any one of SEQ ID NOS: 60-63. The FIX coding sequence can be, for example, CpG-depleted (e.g., all but one CpG dinucleotides removed or fully CpG-depleted) and/or modified to mutate one or more cryptic splice donor sequences (e.g., all identified cryptic splice donor sequences). For example, the FIX coding sequence can be CpG depleted (e.g., all but one CpG dinucleotides removed) and modified to mutate one or more cryptic splice donor sequences (e.g., all identified cryptic splice donor sequences). Optionally, the FIX coding sequence encodes a FIX protein (or a FIX protein comprising a sequence) at least 90%, at least 91%, at least 92%, at least 93%, at least 94%, at least 95%, at least 96%, at least 97%, at least 98%, at least 99%, at least 99.5%, or 100% identical to SEQ ID NO: 97 (and, e.g., retaining the activity of native FIX). Optionally, the FIX coding sequence encodes a FIX protein (or a FIX protein comprising a sequence) at least 95%, at least 96%, at least 97%, at least 98%, at least 99%, at least 99.5%, or 100% identical to SEQ ID NO: 97 (and, e.g., retaining the activity of native FIX). Optionally, the FIX coding sequence in the above examples encodes a FIX protein (or a FIX protein comprising a sequence) at least 99%, at least 99.5%, or 100% identical to SEQ ID NO: 97 (and, e.g., retaining the activity of native FIX). Optionally, the FIX coding sequence in the above examples encodes a FIX protein comprising the sequence set forth in SEQ ID NO: 97. Optionally, the FIX coding sequence in the above examples encodes a FIX protein consisting essentially of the sequence set forth in SEQ ID NO: 97. Optionally, the FIX coding sequence in the above examples encodes a FIX protein consisting of the sequence set forth in SEQ ID NO: 97.

[0485] Various optimized native FIX coding sequences are also provided. In one example, the FIX coding sequence is (or comprises a sequence) at least 90%, at least 91%, at least 92%, at least 93%, at least 94%, at least 95%, at least 96%, at least 97%, at least 98%, at least 99%, at least 99.5%, or 100% identical to any one of SEQ ID NOS: 61-63. In another example, the FIX coding sequence is (or comprises a sequence) at least 95%, at least 96%, at least 97%, at least 98%, at least 99%, at least 99.5%, or 100% identical to any one of SEQ ID NOS: 61-63. In another example, the FIX coding sequence is (or comprises a sequence) at least 99%, at least 99.5%, or 100% identical to any one of SEQ ID NOS: 61-63. In another example, the FIX coding sequence comprises the sequence set forth in any one of SEQ ID NOS: 61-63. In another example, the FIX coding sequence consists essentially of the sequence set forth in any one of SEQ ID NOS: 61-63. In another example, the FIX coding sequence consists of the sequence set forth in any one of SEQ ID NOS: 61-63. The FIX coding sequence can be, for example, CpG-depleted (e.g., all but one CpG dinucleotides removed or fully CpG-depleted) and/or modified to mutate one or more cryptic splice donor sequences (e.g., all identified cryptic splice donor sequences). For example, the FIX coding sequence can be CpG depleted (e.g., all but one CpG dinucleotides removed) and modified to mutate one or more cryptic splice donor sequences (e.g., all identified cryptic splice donor sequences). Optionally, the FIX coding sequence encodes a FIX protein (or a FIX protein comprising a sequence) at least 90%, at least 91%, at least 92%, at least 93%, at least 94%, at least 95%, at least 96%, at least 97%, at least 98%, at least 99%, at least 99.5%, or 100% identical to SEQ ID NO: 97 (and, e.g., retaining the activity of native FIX). Optionally, the FIX coding sequence encodes a FIX protein (or a FIX protein comprising a sequence) at least 95%, at least 96%, at least 97%, at least 98%, at least 99%, at least 99.5%, or 100% identical to SEQ ID NO: 97 (and, e.g., retaining the activity of native FIX). Optionally, the FIX coding sequence in the above examples encodes a FIX protein (or a FIX protein comprising a sequence) at least 99%, at least 99.5%, or 100% identical to SEQ ID NO: 97 (and, e.g., retaining the activity of native FIX). Optionally, the FIX coding sequence in the above examples encodes a FIX protein comprising the sequence set forth in SEQ ID NO: 97. Optionally, the FIX coding sequence in the above examples encodes a FIX protein consisting essentially of the sequence set forth in SEQ ID NO: 97. Optionally, the FIX coding sequence in the above examples encodes a FIX protein consisting of the sequence set forth in SEQ ID NO: 97.

[0486] In one example, the FIX coding sequence is (or comprises a sequence) at least 90%, at least 91%, at least 92%, at least 93%, at least 94%, at least 95%, at least 96%, at least 97%, at least 98%, at least 99%, at least 99.5%, or 100% identical to SEQ ID NO: 61. In another example, the FIX coding sequence is (or comprises a sequence) at least 90%, at least 91%, at least 92%, at least 93%, at least 94%, at least 95%, at least 96%, at least 97%, at least 98%, at least 99%, at least 99.5%, or 100% identical to SEQ ID NO: 61 and encodes a FIX protein (or a FIX protein comprising a sequence) at least 99%, at least 99.5%, or 100% identical to SEQ ID NO: 97. In another example, the FIX coding sequence is (or comprises a sequence) at least 90%, at least 91%, at least 92%, at least 93%, at least 94%, at least 95%, at least 96%, at least 97%, at least 98%, at least 99%, at least 99.5%, or 100% identical to SEQ ID NO: 61 and encodes a FIX protein comprising the sequence set forth in SEQ ID NO: 97. In another example, the FIX coding sequence is (or comprises a sequence) at least 95%, at least 96%, at least 97%, at least 98%, at least 99%, at least 99.5%, or 100% identical to SEQ ID NO: 61. In another example, the FIX coding sequence is (or comprises a sequence) at least 95%, at least 96%, at least 97%, at least 98%, at least 99%, at least 99.5%, or 100% identical to SEQ ID NO: 61 and encodes a FIX protein (or a FIX protein comprising a sequence) at least 99%, at least 99.5%, or 100% identical to SEQ ID NO: 97. In another example, the FIX coding sequence is (or comprises a sequence) at least 95%, at least 96%, at least 97%, at least 98%, at least 99%, at least 99.5%, or 100% identical to SEQ ID NO: 61 and encodes a FIX protein comprising the sequence set forth in SEQ ID NO: 97. In another example, the FIX coding sequence is (or comprises a sequence) at least 99%, at least 99.5%, or 100% identical to SEQ ID NO: 61. In another example, the FIX coding sequence is (or comprises a sequence) at least 99%, at least 99.5%, or 100% identical to SEQ ID NO: 61 and encodes a FIX protein (or a FIX protein comprising a sequence) at least 99%, at least 99.5%, or 100% identical to SEQ ID NO: 97. In another example, the FIX coding sequence is (or comprises a sequence) at least 99%, at least 99.5%, or 100% identical to SEQ ID NO: 61 and encodes a FIX protein comprising the sequence set forth in SEQ ID NO: 97. In another example, the FIX coding sequence comprises the sequence set forth in SEQ ID NO: 61. In another example, the FIX coding sequence consists essentially of the sequence set forth in SEQ ID NO: 61. In another example, the FIX coding sequence consists of the sequence set forth in SEQ ID NO: 61. The FIX coding sequence can be, for example, CpG-depleted (e.g., all but one CpG dinucleotides removed or fully CpG-depleted) and/or modified to mutate one or more cryptic splice donor sequences (e.g., all identified cryptic splice donor sequences). For example, the FIX coding sequence can be CpG depleted (e.g., all but one CpG dinucleotides removed) and modified to mutate one or more cryptic splice donor sequences (e.g., all identified cryptic splice donor sequences). Optionally, the FIX coding sequence encodes a FIX protein (or a FIX protein comprising a sequence) at least 90%, at least 91%, at least 92%, at least 93%, at least 94%, at least 95%, at least 96%, at least 97%, at least 98%, at least 99%, at least 99.5%, or 100% identical to SEQ ID NO: 97 (and, e.g., retaining the activity of native FIX). Optionally, the FIX coding sequence encodes a FIX protein (or a FIX protein comprising a sequence) at least 95%, at least 96%, at least 97%, at least 98%, at least 99%, at least 99.5%, or 100% identical to SEQ ID NO: 97 (and, e.g., retaining the activity of native FIX). Optionally, the FIX coding sequence in the above examples encodes a FIX protein (or a FIX protein comprising a sequence) at least 99%, at least 99.5%, or 100% identical to SEQ ID NO: 97 (and, e.g., retaining the activity of native FIX). Optionally, the FIX coding sequence in the above examples encodes a FIX protein comprising the sequence set forth in SEQ ID NO: 97. Optionally, the FIX coding sequence in the above examples encodes a FIX protein consisting essentially of the sequence set forth in SEQ ID NO: 97. Optionally, the FIX coding sequence in the above examples encodes a FIX protein consisting of the sequence set forth in SEQ ID NO: 97.

[0487] When specific F9 nucleic acid constructs sequences are disclosed herein, they are meant to encompass the sequence disclosed or the reverse complement of the sequence. For example, if a F9 nucleic acid construct disclosed herein consists of the hypothetical sequence 5′-CTGGACCGA-3′, it is also meant to encompass the reverse complement of that sequence (5′-TCGGTCCAG-3′). Likewise, when bidirectional construct elements are disclosed herein in a specific 5′ to 3′ order, they are also meant to encompass the reverse complement of the order of those elements. Likewise, when unidirectional construct elements are disclosed herein in a specific 5′ to 3′ order, they are also meant to encompass the reverse complement of the order of those elements. One reason for this is that, in many embodiments disclosed herein, the F9 nucleic acid constructs are part of a single-stranded recombinant AAV vector. Single-stranded AAV genomes are packaged as either sense (plus-stranded) or anti-sense (minus-stranded genomes), and single-stranded AAV genomes of + and − polarity are packaged with equal frequency into mature rAAV virions. See, e.g., LING et al. (2015) J. Mol. Genet. Med. 9(3):175, Zhou et al. (2008) Mol. Ther. 16(3):494-499, and Samulski et al. (1987) J. Virol. 61:3096-3101, each of which is herein incorporated by reference in its entirety for all purposes.

### (2) Lysosomal Alpha-Glucosidase (GAA)

[0488] Lysosomal alpha-glucosidase (GAA; also known as acid alpha-glucosidase, acid alpha-glucosidase preproprotein, acid maltase, aglucosidase alfa, alpha-1,4-glucosidase, amyloglucosidase, glucoamylase, LYAG) is encoded by GAA. This enzyme is active in lysosomes, where it breaks down glycogen into glucose.

[0489] The human GAA gene (NCBI GeneID 2548) encodes a 952 amino acid protein. In the lysosome, human GAA is sequentially processed by proteases to polypeptides of 76-, 19.4-, and 3.9-kDa that remain associated. Further cleavage between R(200) and A(204) inefficiently converts the 76-kDa polypeptide to the mature 70-kDa form with an additional 10.4-kDa polypeptide. GAA maturation increases its affinity for glycogen by 7-10 fold. A signal peptide is encoded by amino acids 1-27, a propeptide encoded by amino acids 28-69, lysosomal alpha-glucosidase after removal of the signal peptide and propeptide is encoded by amino acids 70-952, the 76 kDa lysosomal alpha-glucosidase is encoded by amino acids 123-952, and the 70 kDa lysosomal alpha-glucosidase is encoded by amino acids 204-952.

[0490] The GAA expressed from the compositions and methods disclosed herein can be any wild type or variant GAA. In one example, the GAA is a human GAA protein. Human GAA is assigned UniProt reference number P10253. An exemplary amino acid sequence for human GAA is assigned NCBI Accession No. NP_000143.2 and is set forth in SEQ ID NO: 293. An exemplary human GAA mRNA (cDNA) sequence is assigned NCBI Accession No. NM_000152.5 and is set forth in SEQ ID NO: 294. An exemplary human GAA coding sequence is assigned CCDS ID CCDS32760.1 and is set forth in SEQ ID NO: 295. An exemplary mature human GAA amino acid sequence (i.e., the human GAA sequence after removal of the signal peptide and propeptide) starting at amino acid 70 (i.e., GAA 70-952) is set forth in SEQ ID NO: 296. An exemplary coding sequence for GAA 70-952 is set forth in SEQ ID NO: 297.

[0491] In some examples, the GAA (e.g., human GAA) is a wild type GAA (e.g., wild type human GAA) sequence or a fragment thereof. For example, the GAA can be a fragment comprising the mature GAA amino acid sequence (i.e., the GAA sequence after removal of the signal peptide and propeptide), a fragment comprising the 77 kDa form of GAA, or a fragment comprising the 70 kDa form of GAA. In a specific example, the GAA can comprise SEQ ID NO: 296 or can be at least 90%, at least 91%, at least 92%, at least 93%, at least 94%, at least 95%, at least 96%, at least 97%, at least 98%, at least 99%, or at least 99.5% identical to SEQ ID NO: 296. In another specific example, the GAA can consist essentially of SEQ ID NO: 296. In another specific example, the GAA can consist of SEQ ID NO: 296.

[0492] The GAA coding sequences in the constructs disclosed herein may include one or more modifications such as codon optimization (e.g., to human codons), depletion of CpG dinucleotides, mutation of cryptic splice sites, addition of one or more glycosylation sites, or any combination thereof. CpG dinucleotides in a construct can limit the therapeutic utility of the construct. First, unmethylated CpG dinucleotides can interact with host toll-like receptor-9 (TLR-9) to stimulate innate, proinflammatory immune responses. Second, once the CpG dinucleotides become methylated, they can result in the suppression of transgene expression coordinated by methyl-CpG binding proteins. Cryptic splice sites are sequences in a pre-messenger RNA that are not normally used as splice sites, but that can be activated, for example, by mutations that either inactivate canonical splice sites or create splice sites where one did not exist before. Accurate splice site selection is critical for successful gene expression, and removal of cryptic splice sites can favor use of the normal or intended splice site.

[0493] In one example, a GAA coding sequence in a construct disclosed herein has one or more cryptic splice sites mutated or removed. In some embodiments, the nucleotide at position 1095 (or the corresponding position when the GAA coding sequence is aligned with SEQ ID NO: 857) is a “G.” In some embodiments, the nucleotide at position 1098 (or the corresponding position when the GAA coding sequence is aligned with SEQ ID NO: 857) is a “C.” In some embodiments, the nucleotide at position 2343 (or the corresponding position when the GAA coding sequence is aligned with SEQ ID NO: 857) is a “G.” In some embodiments, the nucleotide at position 1095 (or the corresponding position when the GAA coding sequence is aligned with SEQ ID NO: 857) is a “G,” the nucleotide at position 1098 (or the corresponding position when the GAA coding sequence is aligned with SEQ ID NO: 857) is a “C,” and the nucleotide at position 2343 (or the corresponding position when the GAA coding sequence is aligned with SEQ ID NO: 857) is a “G.” In another example, a GAA coding sequence in a construct disclosed herein has all identified cryptic splice sites mutated or removed. In another example, a GAA coding sequence in a construct disclosed herein has one or more CpG dinucleotides removed (i.e., is CpG depleted). In another example, a GAA coding sequence in a construct disclosed herein has all CpG dinucleotides removed (i.e., is fully CpG depleted). In another example, a GAA coding sequence in a construct disclosed herein is codon optimized (e.g., codon optimized for expression in a human or mammal). In a specific example, a GAA coding sequence in a construct disclosed herein has one or more CpG dinucleotides removed (i.e., is CpG depleted) and has one or more cryptic splice sites mutated or removed. In another specific example, a GAA coding sequence in a construct disclosed herein has all CpG dinucleotides removed and has one or more or all identified cryptic splice sites mutated or removed. In another specific example, a GAA coding sequence in a construct disclosed herein has one or more CpG dinucleotides removed (i.e., is CpG depleted) and is codon optimized (e.g., codon optimized for expression in a human or mammal). In another specific example, a GAA coding sequence in a construct disclosed herein has all CpG dinucleotides removed (i.e., is fully CpG depleted) and is codon optimized (e.g., codon optimized for expression in a human or mammal).

[0494] Various GAA coding sequences are provided. See, e.g., PCT/US2023/061858 and U.S. Ser. No. 18/163,698, each of which is herein incorporated by reference in its entirety for all purposes. In one example, the GAA coding sequence is (or comprises a sequence) at least 90%, at least 91%, at least 92%, at least 93%, at least 94%, at least 95%, at least 96%, at least 97%, at least 98%, at least 99%, at least 99.5%, or 100% identical to any one of SEQ ID NOS: 297-305 and 326-333. In another example, the GAA coding sequence is (or comprises a sequence) at least 95%, at least 96%, at least 97%, at least 98%, at least 99%, at least 99.5%, or 100% identical to any one of SEQ ID NOS: 297-305 and 326-333. In another example, the GAA coding sequence is (or comprises a sequence) at least 99%, at least 99.5%, or 100% identical to any one of SEQ ID NOS: 297-305 and 326-333. In another example, the GAA coding sequence comprises the sequence set forth in any one of SEQ ID NOS: 297-305 and 326-333. In another example, the GAA coding sequence consists essentially of the sequence set forth in any one of SEQ ID NOS: 297-305 and 326-333. In another example, the GAA coding sequence consists of the sequence set forth in any one of SEQ ID NOS: 297-305 and 326-333. Various GAA coding sequences are provided. In one example, the GAA coding sequence is (or comprises a sequence) at least 90%, at least 91%, at least 92%, at least 93%, at least 94%, at least 95%, at least 96%, at least 97%, at least 98%, at least 99%, at least 99.5%, or 100% identical to any one of SEQ ID NOS: 297-305. In another example, the GAA coding sequence is (or comprises a sequence) at least 95%, at least 96%, at least 97%, at least 98%, at least 99%, at least 99.5%, or 100% identical to any one of SEQ ID NOS: 297-305. In another example, the GAA coding sequence is (or comprises a sequence) at least 99%, at least 99.5%, or 100% identical to any one of SEQ ID NOS: 297-305. In another example, the GAA coding sequence comprises the sequence set forth in any one of SEQ ID NOS: 297-305. In another example, the GAA coding sequence consists essentially of the sequence set forth in any one of SEQ ID NOS: 297-305. In another example, the GAA coding sequence consists of the sequence set forth in any one of SEQ ID NOS: 297-305. In one example, the GAA coding sequence is (or comprises a sequence) at least 90%, at least 91%, at least 92%, at least 93%, at least 94%, at least 95%, at least 96%, at least 97%, at least 98%, at least 99%, at least 99.5%, or 100% identical to SEQ ID NO: 299. In another example, the GAA coding sequence is (or comprises a sequence) at least 95%, at least 96%, at least 97%, at least 98%, at least 99%, at least 99.5%, or 100% identical to SEQ ID NO: 299. In another example, the GAA coding sequence is (or comprises a sequence) at least 99%, at least 99.5%, or 100% identical to SEQ ID NO: 299. In another example, the GAA coding sequence comprises the sequence set forth in SEQ ID NO: 299. In another example, the GAA coding sequence consists essentially of the sequence set forth in SEQ ID NO: 299. In another example, the GAA coding sequence consists of the sequence set forth in SEQ ID NO: 299. Optionally, the GAA coding sequence encodes a GAA protein (or a GAA protein comprising a sequence) at least 90%, at least 91%, at least 92%, at least 93%, at least 94%, at least 95%, at least 96%, at least 97%, at least 98%, at least 99%, at least 99.5%, or 100% identical to SEQ ID NO: 296 (and, e.g., retaining the activity of native GAA). Optionally, the GAA coding sequence encodes a GAA protein (or a GAA protein comprising a sequence) at least 95%, at least 96%, at least 97%, at least 98%, at least 99%, at least 99.5%, or 100% identical to SEQ ID NO: 296 (and, e.g., retaining the activity of native GAA). Optionally, the GAA coding sequence in the above examples encodes a GAA protein (or a GAA protein comprising a sequence) at least 99%, at least 99.5%, or 100% identical to SEQ ID NO: 296 (and, e.g., retaining the activity of native GAA). Optionally, the GAA coding sequence in the above examples encodes a GAA protein comprising the sequence set forth in SEQ ID NO: 296. Optionally, the GAA coding sequence in the above examples encodes a GAA protein consisting essentially of the sequence set forth in SEQ ID NO: 296. Optionally, the GAA coding sequence in the above examples encodes a GAA protein consisting of the sequence set forth in SEQ ID NO: 296.

[0495] Various codon optimized GAA coding sequences are provided. The GAA coding sequence can be, for example, CpG-depleted (e.g., fully CpG depleted) and/or codon optimized (e.g., CpG depleted (e.g., fully CpG-depleted) and codon optimized). In one example, the GAA coding sequence is (or comprises a sequence) at least 90%, at least 91%, at least 92%, at least 93%, at least 94%, at least 95%, at least 96%, at least 97%, at least 98%, at least 99%, at least 99.5%, or 100% identical to any one of SEQ ID NOS: 857, 856, and 299. In another example, the GAA coding sequence is (or comprises a sequence) at least 95%, at least 96%, at least 97%, at least 98%, at least 99%, at least 99.5%, or 100% identical to any one of SEQ ID NOS: 857, 856, and 299. In another example, the GAA coding sequence is (or comprises a sequence) at least 99%, at least 99.5%, or 100% identical to any one of SEQ ID NOS: 857, 856, and 299. In another example, the GAA coding sequence comprises the sequence set forth in any one of SEQ ID NOS: 857, 856, and 299. In another example, the GAA coding sequence consists essentially of the sequence set forth in any one of SEQ ID NOS: 857, 856, and 299. In another example, the GAA coding sequence consists of the sequence set forth in any one of SEQ ID NOS: 857, 856, and 299. Optionally, the GAA coding sequence encodes a GAA protein (or a GAA protein comprising a sequence) at least 90%, at least 91%, at least 92%, at least 93%, at least 94%, at least 95%, at least 96%, at least 97%, at least 98%, at least 99%, at least 99.5%, or 100% identical to SEQ ID NO: 296 (and, e.g., retaining the activity of native GAA). Optionally, the GAA coding sequence encodes a GAA protein (or a GAA protein comprising a sequence) at least 95%, at least 96%, at least 97%, at least 98%, at least 99%, at least 99.5%, or 100% identical to SEQ ID NO: 296 (and, e.g., retaining the activity of native GAA). Optionally, the GAA coding sequence in the above examples encodes a GAA protein (or a GAA protein comprising a sequence) at least 99%, at least 99.5%, or 100% identical to SEQ ID NO: 296 (and, e.g., retaining the activity of native GAA). Optionally, the GAA coding sequence in the above examples encodes a GAA protein comprising the sequence set forth in SEQ ID NO: 296. Optionally, the GAA coding sequence in the above examples encodes a GAA protein consisting essentially of the sequence set forth in SEQ ID NO: 296. Optionally, the GAA coding sequence in the above examples encodes a GAA protein consisting of the sequence set forth in SEQ ID NO: 296. In some embodiments, the nucleotide at position 1095 (or the corresponding position when the GAA coding sequence is aligned with SEQ ID NO: 857) is a “G.” In some embodiments, the nucleotide at position 1098 (or the corresponding position when the GAA coding sequence is aligned with SEQ ID NO: 857) is a “C.” In some embodiments, the nucleotide at position 2343 (or the corresponding position when the GAA coding sequence is aligned with SEQ ID NO: 857) is a “G.” In some embodiments, the nucleotide at position 1095 (or the corresponding position when the GAA coding sequence is aligned with SEQ ID NO: 857) is a “G,” the nucleotide at position 1098 (or the corresponding position when the GAA coding sequence is aligned with SEQ ID NO: 857) is a “C,” and the nucleotide at position 2343 (or the corresponding position when the GAA coding sequence is aligned with SEQ ID NO: 857) is a “G.”

[0496] In one example, the GAA coding sequence is (or comprises a sequence) at least 90%, at least 91%, at least 92%, at least 93%, at least 94%, at least 95%, at least 96%, at least 97%, at least 98%, at least 99%, at least 99.5%, or 100% identical to SEQ ID NO: 857. In another example, the GAA coding sequence is (or comprises a sequence) at least 90%, at least 91%, at least 92%, at least 93%, at least 94%, at least 95%, at least 96%, at least 97%, at least 98%, at least 99%, at least 99.5%, or 100% identical to SEQ ID NO: 857 and encodes a GAA protein (or a GAA protein comprising a sequence) at least 99%, at least 99.5%, or 100% identical to SEQ ID NO: 296. In another example, the GAA coding sequence is (or comprises a sequence) at least 90%, at least 91%, at least 92%, at least 93%, at least 94%, at least 95%, at least 96%, at least 97%, at least 98%, at least 99%, at least 99.5%, or 100% identical to SEQ ID NO: 857 and encodes a GAA protein comprising the sequence set forth in SEQ ID NO: 296. In another example, the GAA coding sequence is (or comprises a sequence) at least 95%, at least 96%, at least 97%, at least 98%, at least 99%, at least 99.5%, or 100% identical to SEQ ID NO: 857. In another example, the GAA coding sequence is (or comprises a sequence) at least 95%, at least 96%, at least 97%, at least 98%, at least 99%, at least 99.5%, or 100% identical to SEQ ID NO: 857 and encodes a GAA protein (or a GAA protein comprising a sequence) at least 99%, at least 99.5%, or 100% identical to SEQ ID NO: 296. In another example, the GAA coding sequence is (or comprises a sequence) at least 95%, at least 96%, at least 97%, at least 98%, at least 99%, at least 99.5%, or 100% identical to SEQ ID NO: 857 and encodes a GAA protein comprising the sequence set forth in SEQ ID NO: 296. In another example, the GAA coding sequence is (or comprises a sequence) at least 99%, at least 99.5%, or 100% identical to SEQ ID NO: 857. In another example, the GAA coding sequence is (or comprises a sequence) at least 99%, at least 99.5%, or 100% identical to SEQ ID NO: 857 and encodes a GAA protein (or a GAA protein comprising a sequence) at least 99%, at least 99.5%, or 100% identical to SEQ ID NO: 296. In another example, the GAA coding sequence is (or comprises a sequence) at least 99%, at least 99.5%, or 100% identical to SEQ ID NO: 857 and encodes a GAA protein comprising the sequence set forth in SEQ ID NO: 296. In another example, the GAA coding sequence comprises the sequence set forth in SEQ ID NO: 857. In another example, the GAA coding sequence consists essentially of the sequence set forth in SEQ ID NO: 857. In another example, the GAA coding sequence consists of the sequence set forth in SEQ ID NO: 857. The GAA coding sequence can be, for example, CpG-depleted (e.g., fully CpG-depleted) and/or codon optimized. For example, the GAA coding sequence can be CpG depleted (e.g., fully CpG-depleted) and codon optimized. Optionally, the GAA coding sequence encodes a GAA protein (or a GAA protein comprising a sequence) at least 90%, at least 91%, at least 92%, at least 93%, at least 94%, at least 95%, at least 96%, at least 97%, at least 98%, at least 99%, at least 99.5%, or 100% identical to SEQ ID NO: 296 (and, e.g., retaining the activity of native GAA). Optionally, the GAA coding sequence encodes a GAA protein (or a GAA protein comprising a sequence) at least 95%, at least 96%, at least 97%, at least 98%, at least 99%, at least 99.5%, or 100% identical to SEQ ID NO: 296 (and, e.g., retaining the activity of native GAA). Optionally, the GAA coding sequence in the above examples encodes a GAA protein (or a GAA protein comprising a sequence) at least 99%, at least 99.5%, or 100% identical to SEQ ID NO: 296 (and, e.g., retaining the activity of native GAA). Optionally, the GAA coding sequence in the above examples encodes a GAA protein comprising the sequence set forth in SEQ ID NO: 296. Optionally, the GAA coding sequence in the above examples encodes a GAA protein consisting essentially of the sequence set forth in SEQ ID NO: 296. Optionally, the GAA coding sequence in the above examples encodes a GAA protein consisting of the sequence set forth in SEQ ID NO: 296. In some embodiments, the nucleotide at position 1095 (or the corresponding position when the GAA coding sequence is aligned with SEQ ID NO: 857) is a “G.” In some embodiments, the nucleotide at position 1098 (or the corresponding position when the GAA coding sequence is aligned with SEQ ID NO: 857) is a “C.” In some embodiments, the nucleotide at position 2343 (or the corresponding position when the GAA coding sequence is aligned with SEQ ID NO: 857) is a “G.” In some embodiments, the nucleotide at position 1095 (or the corresponding position when the GAA coding sequence is aligned with SEQ ID NO: 857) is a “G,” the nucleotide at position 1098 (or the corresponding position when the GAA coding sequence is aligned with SEQ ID NO: 857) is a “C,” and the nucleotide at position 2343 (or the corresponding position when the GAA coding sequence is aligned with SEQ ID NO: 857) is a “G.”

[0497] In one example, the GAA coding sequence is (or comprises a sequence) at least 90%, at least 91%, at least 92%, at least 93%, at least 94%, at least 95%, at least 96%, at least 97%, at least 98%, at least 99%, at least 99.5%, or 100% identical to SEQ ID NO: 856. In another example, the GAA coding sequence is (or comprises a sequence) at least 90%, at least 91%, at least 92%, at least 93%, at least 94%, at least 95%, at least 96%, at least 97%, at least 98%, at least 99%, at least 99.5%, or 100% identical to SEQ ID NO: 856 and encodes a GAA protein (or a GAA protein comprising a sequence) at least 99%, at least 99.5%, or 100% identical to SEQ ID NO: 296. In another example, the GAA coding sequence is (or comprises a sequence) at least 90%, at least 91%, at least 92%, at least 93%, at least 94%, at least 95%, at least 96%, at least 97%, at least 98%, at least 99%, at least 99.5%, or 100% identical to SEQ ID NO: 856 and encodes a GAA protein comprising the sequence set forth in SEQ ID NO: 296. In another example, the GAA coding sequence is (or comprises a sequence) at least 95%, at least 96%, at least 97%, at least 98%, at least 99%, at least 99.5%, or 100% identical to SEQ ID NO: 856. In another example, the GAA coding sequence is (or comprises a sequence) at least 95%, at least 96%, at least 97%, at least 98%, at least 99%, at least 99.5%, or 100% identical to SEQ ID NO: 856 and encodes a GAA protein (or a GAA protein comprising a sequence) at least 99%, at least 99.5%, or 100% identical to SEQ ID NO: 296. In another example, the GAA coding sequence is (or comprises a sequence) at least 95%, at least 96%, at least 97%, at least 98%, at least 99%, at least 99.5%, or 100% identical to SEQ ID NO: 856 and encodes a GAA protein comprising the sequence set forth in SEQ ID NO: 296. In another example, the GAA coding sequence is (or comprises a sequence) at least 99%, at least 99.5%, or 100% identical to SEQ ID NO: 856. In another example, the GAA coding sequence is (or comprises a sequence) at least 99%, at least 99.5%, or 100% identical to SEQ ID NO: 856 and encodes a GAA protein (or a GAA protein comprising a sequence) at least 99%, at least 99.5%, or 100% identical to SEQ ID NO: 296. In another example, the GAA coding sequence is (or comprises a sequence) at least 99%, at least 99.5%, or 100% identical to SEQ ID NO: 856 and encodes a GAA protein comprising the sequence set forth in SEQ ID NO: 296. In another example, the GAA coding sequence comprises the sequence set forth in SEQ ID NO: 856. In another example, the GAA coding sequence consists essentially of the sequence set forth in SEQ ID NO: 856. In another example, the GAA coding sequence consists of the sequence set forth in SEQ ID NO: 856. The GAA coding sequence can be, for example, CpG-depleted (e.g., fully CpG-depleted) and/or codon optimized. For example, the GAA coding sequence can be CpG depleted (e.g., fully CpG-depleted) and codon optimized. Optionally, the GAA coding sequence encodes a GAA protein (or a GAA protein comprising a sequence) at least 90%, at least 91%, at least 92%, at least 93%, at least 94%, at least 95%, at least 96%, at least 97%, at least 98%, at least 99%, at least 99.5%, or 100% identical to SEQ ID NO: 296 (and, e.g., retaining the activity of native GAA). Optionally, the GAA coding sequence encodes a GAA protein (or a GAA protein comprising a sequence) at least 95%, at least 96%, at least 97%, at least 98%, at least 99%, at least 99.5%, or 100% identical to SEQ ID NO: 296 (and, e.g., retaining the activity of native GAA). Optionally, the GAA coding sequence in the above examples encodes a GAA protein (or a GAA protein comprising a sequence) at least 99%, at least 99.5%, or 100% identical to SEQ ID NO: 296 (and, e.g., retaining the activity of native GAA). Optionally, the GAA coding sequence in the above examples encodes a GAA protein comprising the sequence set forth in SEQ ID NO: 296. Optionally, the GAA coding sequence in the above examples encodes a GAA protein consisting essentially of the sequence set forth in SEQ ID NO: 296. Optionally, the GAA coding sequence in the above examples encodes a GAA protein consisting of the sequence set forth in SEQ ID NO: 296. In some embodiments, the nucleotide at position 1095 (or the corresponding position when the GAA coding sequence is aligned with SEQ ID NO: 857) is a “G.” In some embodiments, the nucleotide at position 1098 (or the corresponding position when the GAA coding sequence is aligned with SEQ ID NO: 857) is a “C.” In some embodiments, the nucleotide at position 2343 (or the corresponding position when the GAA coding sequence is aligned with SEQ ID NO: 857) is a “G.” In some embodiments, the nucleotide at position 1095 (or the corresponding position when the GAA coding sequence is aligned with SEQ ID NO: 857) is a “G,” the nucleotide at position 1098 (or the corresponding position when the GAA coding sequence is aligned with SEQ ID NO: 857) is a “C,” and the nucleotide at position 2343 (or the corresponding position when the GAA coding sequence is aligned with SEQ ID NO: 857) is a “G.”

[0498] Various codon optimized GAA coding sequences are provided. The GAA coding sequence can be, for example, CpG-depleted (e.g., fully CpG depleted) and/or codon optimized (e.g., CpG depleted (e.g., fully CpG-depleted) and codon optimized). In one example, the GAA coding sequence is (or comprises a sequence) at least 90%, at least 91%, at least 92%, at least 93%, at least 94%, at least 95%, at least 96%, at least 97%, at least 98%, at least 99%, at least 99.5%, or 100% identical to any one of SEQ ID NOS: 298-305. In another example, the GAA coding sequence is (or comprises a sequence) at least 95%, at least 96%, at least 97%, at least 98%, at least 99%, at least 99.5%, or 100% identical to any one of SEQ ID NOS: 298-305. In another example, the GAA coding sequence is (or comprises a sequence) at least 99%, at least 99.5%, or 100% identical to any one of SEQ ID NOS: 298-305. In another example, the GAA coding sequence comprises the sequence set forth in any one of SEQ ID NOS: 298-305. In another example, the GAA coding sequence consists essentially of the sequence set forth in any one of SEQ ID NOS: 298-305. In another example, the GAA coding sequence consists of the sequence set forth in any one of SEQ ID NOS: 298-305. Optionally, the GAA coding sequence encodes a GAA protein (or a GAA protein comprising a sequence) at least 90%, at least 91%, at least 92%, at least 93%, at least 94%, at least 95%, at least 96%, at least 97%, at least 98%, at least 99%, at least 99.5%, or 100% identical to SEQ ID NO: 296 (and, e.g., retaining the activity of native GAA). Optionally, the GAA coding sequence encodes a GAA protein (or a GAA protein comprising a sequence) at least 95%, at least 96%, at least 97%, at least 98%, at least 99%, at least 99.5%, or 100% identical to SEQ ID NO: 296 (and, e.g., retaining the activity of native GAA). Optionally, the GAA coding sequence in the above examples encodes a GAA protein (or a GAA protein comprising a sequence) at least 99%, at least 99.5%, or 100% identical to SEQ ID NO: 296 (and, e.g., retaining the activity of native GAA). Optionally, the GAA coding sequence in the above examples encodes a GAA protein comprising the sequence set forth in SEQ ID NO: 296. Optionally, the GAA coding sequence in the above examples encodes a GAA protein consisting essentially of the sequence set forth in SEQ ID NO: 296. Optionally, the GAA coding sequence in the above examples encodes a GAA protein consisting of the sequence set forth in SEQ ID NO: 296.

[0499] In one example, the GAA coding sequence is (or comprises a sequence) at least 90%, at least 91%, at least 92%, at least 93%, at least 94%, at least 95%, at least 96%, at least 97%, at least 98%, at least 99%, at least 99.5%, or 100% identical to SEQ ID NO: 299. In another example, the GAA coding sequence is (or comprises a sequence) at least 90%, at least 91%, at least 92%, at least 93%, at least 94%, at least 95%, at least 96%, at least 97%, at least 98%, at least 99%, at least 99.5%, or 100% identical to SEQ ID NO: 299 and encodes a GAA protein (or a GAA protein comprising a sequence) at least 99%, at least 99.5%, or 100% identical to SEQ ID NO: 296. In another example, the GAA coding sequence is (or comprises a sequence) at least 90%, at least 91%, at least 92%, at least 93%, at least 94%, at least 95%, at least 96%, at least 97%, at least 98%, at least 99%, at least 99.5%, or 100% identical to SEQ ID NO: 299 and encodes a GAA protein comprising the sequence set forth in SEQ ID NO: 296. In another example, the GAA coding sequence is (or comprises a sequence) at least 95%, at least 96%, at least 97%, at least 98%, at least 99%, at least 99.5%, or 100% identical to SEQ ID NO: 299. In another example, the GAA coding sequence is (or comprises a sequence) at least 95%, at least 96%, at least 97%, at least 98%, at least 99%, at least 99.5%, or 100% identical to SEQ ID NO: 299 and encodes a GAA protein (or a GAA protein comprising a sequence) at least 99%, at least 99.5%, or 100% identical to SEQ ID NO: 296. In another example, the GAA coding sequence is (or comprises a sequence) at least 95%, at least 96%, at least 97%, at least 98%, at least 99%, at least 99.5%, or 100% identical to SEQ ID NO: 299 and encodes a GAA protein comprising the sequence set forth in SEQ ID NO: 296. In another example, the GAA coding sequence is (or comprises a sequence) at least 99%, at least 99.5%, or 100% identical to SEQ ID NO: 299. In another example, the GAA coding sequence is (or comprises a sequence) at least 99%, at least 99.5%, or 100% identical to SEQ ID NO: 299 and encodes a GAA protein (or a GAA protein comprising a sequence) at least 99%, at least 99.5%, or 100% identical to SEQ ID NO: 296. In another example, the GAA coding sequence is (or comprises a sequence) at least 99%, at least 99.5%, or 100% identical to SEQ ID NO: 299 and encodes a GAA protein comprising the sequence set forth in SEQ ID NO: 296. In another example, the GAA coding sequence comprises the sequence set forth in SEQ ID NO: 299. In another example, the GAA coding sequence consists essentially of the sequence set forth in SEQ ID NO: 299. In another example, the GAA coding sequence consists of the sequence set forth in SEQ ID NO: 299. The GAA coding sequence can be, for example, CpG-depleted (e.g., fully CpG-depleted) and/or codon optimized. For example, the GAA coding sequence can be CpG depleted (e.g., fully CpG-depleted) and codon optimized. Optionally, the GAA coding sequence encodes a GAA protein (or a GAA protein comprising a sequence) at least 90%, at least 91%, at least 92%, at least 93%, at least 94%, at least 95%, at least 96%, at least 97%, at least 98%, at least 99%, at least 99.5%, or 100% identical to SEQ ID NO: 296 (and, e.g., retaining the activity of native GAA). Optionally, the GAA coding sequence encodes a GAA protein (or a GAA protein comprising a sequence) at least 95%, at least 96%, at least 97%, at least 98%, at least 99%, at least 99.5%, or 100% identical to SEQ ID NO: 296 (and, e.g., retaining the activity of native GAA). Optionally, the GAA coding sequence in the above examples encodes a GAA protein (or a GAA protein comprising a sequence) at least 99%, at least 99.5%, or 100% identical to SEQ ID NO: 296 (and, e.g., retaining the activity of native GAA). Optionally, the GAA coding sequence in the above examples encodes a GAA protein comprising the sequence set forth in SEQ ID NO: 296. Optionally, the GAA coding sequence in the above examples encodes a GAA protein consisting essentially of the sequence set forth in SEQ ID NO: 296. Optionally, the GAA coding sequence in the above examples encodes a GAA protein consisting of the sequence set forth in SEQ ID NO: 296.

[0500] In one example, the GAA coding sequence is (or comprises a sequence) at least 90%, at least 91%, at least 92%, at least 93%, at least 94%, at least 95%, at least 96%, at least 97%, at least 98%, at least 99%, at least 99.5%, or 100% identical to SEQ ID NO: 297. In another example, the GAA coding sequence is (or comprises a sequence) at least 90%, at least 91%, at least 92%, at least 93%, at least 94%, at least 95%, at least 96%, at least 97%, at least 98%, at least 99%, at least 99.5%, or 100% identical to SEQ ID NO: 297 and encodes a GAA protein (or a GAA protein comprising a sequence) at least 99%, at least 99.5%, or 100% identical to SEQ ID NO: 296. In another example, the GAA coding sequence is (or comprises a sequence) at least 90%, at least 91%, at least 92%, at least 93%, at least 94%, at least 95%, at least 96%, at least 97%, at least 98%, at least 99%, at least 99.5%, or 100% identical to SEQ ID NO: 297 and encodes a GAA protein comprising the sequence set forth in SEQ ID NO: 296. In another example, the GAA coding sequence is (or comprises a sequence) at least 95%, at least 96%, at least 97%, at least 98%, at least 99%, at least 99.5%, or 100% identical to SEQ ID NO: 297. In another example, the GAA coding sequence is (or comprises a sequence) at least 95%, at least 96%, at least 97%, at least 98%, at least 99%, at least 99.5%, or 100% identical to SEQ ID NO: 297 and encodes a GAA protein (or a GAA protein comprising a sequence) at least 99%, at least 99.5%, or 100% identical to SEQ ID NO: 296. In another example, the GAA coding sequence is (or comprises a sequence) at least 95%, at least 96%, at least 97%, at least 98%, at least 99%, at least 99.5%, or 100% identical to SEQ ID NO: 297 and encodes a GAA protein comprising the sequence set forth in SEQ ID NO: 296. In another example, the GAA coding sequence is (or comprises a sequence) at least 99%, at least 99.5%, or 100% identical to SEQ ID NO: 297. In another example, the GAA coding sequence is (or comprises a sequence) at least 99%, at least 99.5%, or 100% identical to SEQ ID NO: 297 and encodes a GAA protein (or a GAA protein comprising a sequence) at least 99%, at least 99.5%, or 100% identical to SEQ ID NO: 296. In another example, the GAA coding sequence is (or comprises a sequence) at least 99%, at least 99.5%, or 100% identical to SEQ ID NO: 297 and encodes a GAA protein comprising the sequence set forth in SEQ ID NO: 296. In another example, the GAA coding sequence comprises the sequence set forth in SEQ ID NO: 297. In another example, the GAA coding sequence consists essentially of the sequence set forth in SEQ ID NO: 297. In another example, the GAA coding sequence consists of the sequence set forth in SEQ ID NO: 297. The GAA coding sequence can be, for example, CpG-depleted (e.g., fully CpG-depleted) and/or codon optimized. For example, the GAA coding sequence can be CpG depleted (e.g., fully CpG-depleted) and codon optimized. Optionally, the GAA coding sequence encodes a GAA protein (or a GAA protein comprising a sequence) at least 90%, at least 91%, at least 92%, at least 93%, at least 94%, at least 95%, at least 96%, at least 97%, at least 98%, at least 99%, at least 99.5%, or 100% identical to SEQ ID NO: 296 (and, e.g., retaining the activity of native GAA). Optionally, the GAA coding sequence encodes a GAA protein (or a GAA protein comprising a sequence) at least 95%, at least 96%, at least 97%, at least 98%, at least 99%, at least 99.5%, or 100% identical to SEQ ID NO: 296 (and, e.g., retaining the activity of native GAA). Optionally, the GAA coding sequence in the above examples encodes a GAA protein (or a GAA protein comprising a sequence) at least 99%, at least 99.5%, or 100% identical to SEQ ID NO: 296 (and, e.g., retaining the activity of native GAA). Optionally, the GAA coding sequence in the above examples encodes a GAA protein comprising the sequence set forth in SEQ ID NO: 296. Optionally, the GAA coding sequence in the above examples encodes a GAA protein consisting essentially of the sequence set forth in SEQ ID NO: 296. Optionally, the GAA coding sequence in the above examples encodes a GAA protein consisting of the sequence set forth in SEQ ID NO: 296.

[0501] When specific GAA or multidomain therapeutic protein nucleic acid constructs sequences are disclosed herein, they are meant to encompass the sequence disclosed or the reverse complement of the sequence. For example, if a GAA or multidomain therapeutic protein nucleic acid construct disclosed herein consists of the hypothetical sequence 5′-CTGGACCGA-3′, it is also meant to encompass the reverse complement of that sequence (5′-TCGGTCCAG-3′). Likewise, when construct elements are disclosed herein in a specific 5′ to 3′ order, they are also meant to encompass the reverse complement of the order of those elements. One reason for this is that, in many embodiments disclosed herein, the GAA or multidomain therapeutic protein nucleic acid constructs are part of a single-stranded recombinant AAV vector. Single-stranded AAV genomes are packaged as either sense (plus-stranded) or anti-sense (minus-stranded genomes), and single-stranded AAV genomes of + and − polarity are packaged with equal frequency into mature rAAV virions. See, e.g., LING et al. (2015) J. Mol. Genet. Med. 9(3):175, Zhou et al. (2008) Mol. Ther. 16(3):494-499, and Samulski et al. (1987) J. Virol. 61:3096-3101, each of which is herein incorporated by reference in its entirety for all purposes.

### (3) CD63-Binding Delivery Domain

[0502] The multidomain therapeutic proteins disclosed herein can comprise a CD63-binding delivery domain fused to a GAA. See, e.g., PCT/US2023/061858 and U.S. Ser. No. 18/163,698, each of which is herein incorporated by reference in its entirety for all purposes. The CD63-binding domain provides binding to the internalization factor CD63 (UniProt Ref. P08962-1). CD63 (also known as CD63 antigen, granulophysin, lysosomal-associated membrane protein 3, LAMP-3, lysosome integral membrane protein 1, Limp1, melanoma-associated antigen ME491, OMA81H, ocular melanoma-associated antigen, tetraspanin-30, or Tspan-30) is a member of the tetraspanin superfamily of cell surface proteins that span the cell membrane four times. It is encoded by the CD63 gene (also known as MIA1 or TSPAN30). CD63 is expressed in virtually all tissues and is thought to be involved in forming and stabilizing signaling complexes. CD63 localizes to the cell membrane, lysosomal membrane, and late endosomal membrane. CD63 is known to associate with integrins and may be involved in epithelial-mesenchymal transitioning.

[0503] In some multidomain therapeutic proteins, the CD63-binding delivery domain is an antibody, an antibody fragment or other antigen-binding protein. In some multidomain therapeutic proteins, the CD63-binding delivery domain is an antigen-binding protein. Examples of antigen-binding proteins include, for example, a receptor-fusion molecule, a trap molecule, a receptor-Fc fusion molecule, an antibody, an Fab fragment, an F(ab′)2 fragment, an Fd fragment, an Fv fragment, a single-chain Fv (scFv) molecule, a dAb fragment, an isolated complementarity determining region (CDR), a CDR3 peptide, a constrained FR3-CDR3-FR4 peptide, a domain-specific antibody, a single domain antibody, a domain-deleted antibody, a chimeric antibody, a CDR-grafted antibody, a diabody, a triabody, a tetrabody, a minibody, a nanobody, a monovalent nanobody, a bivalent nanobody, a small modular immunopharmaceutical (SMIP), a camelid antibody (VHH heavy chain homodimeric antibody), and a shark variable IgNAR domain. Examples of CD63-binding delivery domains can be found in WO 2013/138400, WO 2017/007796, WO 2017/190079, WO 2017/100467, WO 2018/226861, WO 2019/157224, and WO 2019/222663, each of which is herein incorporated by reference in its entirety for all purposes.

[0504] In a particular multidomain therapeutic protein, the CD63-binding delivery domain is an anti-CD63 scFv. In a specific example, the anti-CD63 scFv can comprise SEQ ID NO: 306 or can be at least 90%, at least 91%, at least 92%, at least 93%, at least 94%, at least 95%, at least 96%, at least 97%, at least 98%, at least 99%, or at least 99.5% identical to SEQ ID NO: 306. In another specific example, the anti-CD63 scFv can consist essentially of SEQ ID NO: 306. In another specific example, the anti-CD63 scFv can consist of SEQ ID NO: 306.

[0505] The CD63-binding delivery domain coding sequences in the constructs disclosed herein may include one or more modifications such as codon optimization (e.g., to human codons), depletion of CpG dinucleotides, mutation of cryptic splice sites, addition of one or more glycosylation sites, or any combination thereof. CpG dinucleotides in a construct can limit the therapeutic utility of the construct. First, unmethylated CpG dinucleotides can interact with host toll-like receptor-9 (TLR-9) to stimulate innate, proinflammatory immune responses. Second, once the CpG dinucleotides become methylated, they can result in the suppression of transgene expression coordinated by methyl-CpG binding proteins. Cryptic splice sites are sequences in a pre-messenger RNA that are not normally used as splice sites, but that can be activated, for example, by mutations that either inactivate canonical splice sites or create splice sites where one did not exist before. Accurate splice site selection is critical for successful gene expression, and removal of cryptic splice sites can favor use of the normal or intended splice site.

[0506] In one example, a CD63-binding delivery domain coding sequence in a construct disclosed herein has one or more cryptic splice sites mutated or removed. In another example, a CD63-binding delivery domain coding sequence in a construct disclosed herein has all identified cryptic splice sites mutated or removed. In another example, a CD63-binding delivery domain coding sequence in a construct disclosed herein has one or more CpG dinucleotides removed (i.e., is CpG depleted). In another example, a CD63-binding delivery domain coding sequence in a construct disclosed herein has all CpG dinucleotides removed (i.e., is fully CpG depleted). In another example, a CD63-binding delivery domain coding sequence in a construct disclosed herein is codon optimized (e.g., codon optimized for expression in a human or mammal). In a specific example, a CD63-binding delivery domain coding sequence in a construct disclosed herein has one or more CpG dinucleotides removed (i.e., is CpG depleted) and has one or more cryptic splice sites mutated or removed. In another specific example, a CD63-binding delivery domain coding sequence in a construct disclosed herein has all CpG dinucleotides removed and has one or more or all identified cryptic splice sites mutated or removed. In another specific example, a CD63-binding delivery domain coding sequence in a construct disclosed herein has one or more CpG dinucleotides removed (i.e., is CpG depleted) and is codon optimized (e.g., codon optimized for expression in a human or mammal). In another specific example, a CD63-binding delivery domain coding sequence in a construct disclosed herein has all CpG dinucleotides removed (i.e., is fully CpG depleted) and is codon optimized (e.g., codon optimized for expression in a human or mammal).

[0507] Various anti-CD63 scFv coding sequences are provided. In one example, the anti-CD63 scFv coding sequence is (or comprises a sequence) at least 90%, at least 91%, at least 92%, at least 93%, at least 94%, at least 95%, at least 96%, at least 97%, at least 98%, at least 99%, at least 99.5%, or 100% identical to any one of SEQ ID NOS: 866, 867, and 309. In another example, the anti-CD63 scFv coding sequence is (or comprises a sequence) at least 95%, at least 96%, at least 97%, at least 98%, at least 99%, at least 99.5%, or 100% identical to any one of SEQ ID NOS: 866, 867, and 309. In another example, the anti-CD63 scFv coding sequence is (or comprises a sequence) at least 99%, at least 99.5%, or 100% identical to any one of SEQ ID NOS: 866, 867, and 309. In another example, the anti-CD63 scFv coding sequence comprises the sequence set forth in any one of SEQ ID NOS: 866, 867, and 309. In another example, the anti-CD63 scFv coding sequence consists essentially of the sequence set forth in any one of SEQ ID NOS: 866, 867, and 309. In another example, the anti-CD63 scFv coding sequence consists of the sequence set forth in any one of SEQ ID NOS: 866, 867, and 309. In one example, the anti-CD63 scFv coding sequence is (or comprises a sequence) at least 90%, at least 91%, at least 92%, at least 93%, at least 94%, at least 95%, at least 96%, at least 97%, at least 98%, at least 99%, at least 99.5%, or 100% identical to SEQ ID NO: 866. In another example, the anti-CD63 scFv coding sequence is (or comprises a sequence) at least 95%, at least 96%, at least 97%, at least 98%, at least 99%, at least 99.5%, or 100% identical to SEQ ID NO: 866. In another example, the anti-CD63 scFv coding sequence is (or comprises a sequence) at least 99%, at least 99.5%, or 100% identical to SEQ ID NO: 866. In another example, the anti-CD63 scFv coding sequence comprises the sequence set forth in SEQ ID NO: 866. In another example, the anti-CD63 scFv coding sequence consists essentially of the sequence set forth in SEQ ID NO: 866. In another example, the anti-CD63 scFv coding sequence consists of the sequence set forth in SEQ ID NO: 866. Optionally, the anti-CD63 scFv coding sequence encodes an anti-CD63 scFv protein (or an anti-CD63 scFv protein comprising a sequence) at least 90%, at least 91%, at least 92%, at least 93%, at least 94%, at least 95%, at least 96%, at least 97%, at least 98%, at least 99%, at least 99.5%, or 100% identical to SEQ ID NO: 306 (and, e.g., retaining CD63-binding activity). Optionally, the anti-CD63 scFv coding sequence encodes an anti-CD63 scFv protein (or an anti-CD63 scFv protein comprising a sequence) at least 95%, at least 96%, at least 97%, at least 98%, at least 99%, at least 99.5%, or 100% identical to SEQ ID NO: 306 (and, e.g., retaining CD63-binding activity). Optionally, the anti-CD63 scFv coding sequence in the above examples encodes an anti-CD63 scFv protein (or an anti-CD63 scFv protein comprising a sequence) at least 99%, at least 99.5%, or 100% identical to SEQ ID NO: 306 (and, e.g., retaining CD63-binding activity). Optionally, the anti-CD63 scFv coding sequence in the above examples encodes an anti-CD63 scFv protein comprising the sequence set forth in SEQ ID NO: 306. Optionally, the anti-CD63 scFv coding sequence in the above examples encodes an anti-CD63 scFv protein consisting essentially of the sequence set forth in SEQ ID NO: 306. Optionally, the anti-CD63 scFv coding sequence in the above examples encodes an anti-CD63 scFv protein consisting of the sequence set forth in SEQ ID NO: 306. In some embodiments, the nucleotide at position 3 (or the corresponding position when the anti-CD63 scFv coding sequence is aligned with SEQ ID NO: 866) is an “A.” In some embodiments, the nucleotide at position 132 (or the corresponding position when the anti-CD63 scFv coding sequence is aligned with SEQ ID NO: 866) is an “A.” In some embodiments, the nucleotide at position 273 (or the corresponding position when the anti-CD63 scFv coding sequence is aligned with SEQ ID NO: 866) is a “T.” In some embodiments, the nucleotide at position 3 (or the corresponding position when the anti-CD63 scFv coding sequence is aligned with SEQ ID NO: 866) is an “A,” the nucleotide at position 132 (or the corresponding position when the anti-CD63 scFv coding sequence is aligned with SEQ ID NO: 866) is an “A,” and the nucleotide at position 273 (or the corresponding position when the anti-CD63 scFv coding sequence is aligned with SEQ ID NO: 866) is a “T.”

[0508] In one example, the anti-CD63 scFv coding sequence is (or comprises a sequence) at least 90%, at least 91%, at least 92%, at least 93%, at least 94%, at least 95%, at least 96%, at least 97%, at least 98%, at least 99%, at least 99.5%, or 100% identical to SEQ ID NO: 866. In another example, the anti-CD63 scFv coding sequence is (or comprises a sequence) at least 90%, at least 91%, at least 92%, at least 93%, at least 94%, at least 95%, at least 96%, at least 97%, at least 98%, at least 99%, at least 99.5%, or 100% identical to SEQ ID NO: 866 and encodes an anti-CD63 scFv protein (or an anti-CD63 scFv protein comprising a sequence) at least 99%, at least 99.5%, or 100% identical to SEQ ID NO: 306. In another example, the anti-CD63 scFv coding sequence is (or comprises a sequence) at least 90%, at least 91%, at least 92%, at least 93%, at least 94%, at least 95%, at least 96%, at least 97%, at least 98%, at least 99%, at least 99.5%, or 100% identical to SEQ ID NO: 866 and encodes an anti-CD63 scFv protein comprising the sequence set forth in SEQ ID NO: 306. In another example, the anti-CD63 scFv coding sequence is (or comprises a sequence) at least 95%, at least 96%, at least 97%, at least 98%, at least 99%, at least 99.5%, or 100% identical to SEQ ID NO: 866. In another example, the anti-CD63 scFv coding sequence is (or comprises a sequence) at least 95%, at least 96%, at least 97%, at least 98%, at least 99%, at least 99.5%, or 100% identical to SEQ ID NO: 866 and encodes an anti-CD63 scFv protein (or an anti-CD63 scFv protein comprising a sequence) at least 99%, at least 99.5%, or 100% identical to SEQ ID NO: 306. In another example, the anti-CD63 scFv coding sequence is (or comprises a sequence) at least 95%, at least 96%, at least 97%, at least 98%, at least 99%, at least 99.5%, or 100% identical to SEQ ID NO: 866 and encodes an anti-CD63 scFv protein comprising the sequence set forth in SEQ ID NO: 306. In another example, the anti-CD63 scFv coding sequence is (or comprises a sequence) at least 99%, at least 99.5%, or 100% identical to SEQ ID NO: 866. In another example, the anti-CD63 scFv coding sequence is (or comprises a sequence) at least 99%, at least 99.5%, or 100% identical to SEQ ID NO: 866 and encodes an anti-CD63 scFv protein (or an anti-CD63 scFv protein comprising a sequence) at least 99%, at least 99.5%, or 100% identical to SEQ ID NO: 306. In another example, the anti-CD63 scFv coding sequence is (or comprises a sequence) at least 99%, at least 99.5%, or 100% identical to SEQ ID NO: 866 and encodes an anti-CD63 scFv protein comprising the sequence set forth in SEQ ID NO: 306. In another example, the anti-CD63 scFv coding sequence comprises the sequence set forth in SEQ ID NO: 866. In another example, the anti-CD63 scFv coding sequence consists essentially of the sequence set forth in SEQ ID NO: 866. In another example, the anti-CD63 scFv coding sequence consists of the sequence set forth in SEQ ID NO: 866. The anti-CD63 scFv coding sequence can be, for example, CpG-depleted (e.g., fully CpG-depleted) and/or codon optimized. For example, the anti-CD63 scFv coding sequence can be CpG depleted (e.g., fully CpG-depleted) and codon optimized. Optionally, the anti-CD63 scFv coding sequence encodes an anti-CD63 scFv protein (or an anti-CD63 scFv protein comprising a sequence) at least 90%, at least 91%, at least 92%, at least 93%, at least 94%, at least 95%, at least 96%, at least 97%, at least 98%, at least 99%, at least 99.5%, or 100% identical to SEQ ID NO: 306 (and, e.g., retaining CD63-binding activity). Optionally, the anti-CD63 scFv coding sequence encodes an anti-CD63 scFv protein (or an anti-CD63 scFv protein comprising a sequence) at least 95%, at least 96%, at least 97%, at least 98%, at least 99%, at least 99.5%, or 100% identical to SEQ ID NO: 306 (and, e.g., retaining CD63-binding activity). Optionally, the anti-CD63 scFv coding sequence in the above examples encodes an anti-CD63 scFv protein (or an anti-CD63 scFv protein comprising a sequence) at least 99%, at least 99.5%, or 100% identical to SEQ ID NO: 306 (and, e.g., retaining CD63-binding activity). Optionally, the anti-CD63 scFv coding sequence in the above examples encodes an anti-CD63 scFv protein comprising the sequence set forth in SEQ ID NO: 306. Optionally, the anti-CD63 scFv coding sequence in the above examples encodes an anti-CD63 scFv protein consisting essentially of the sequence set forth in SEQ ID NO: 306. Optionally, the anti-CD63 scFv coding sequence in the above examples encodes an anti-CD63 scFv protein consisting of the sequence set forth in SEQ ID NO: 306. In some embodiments, the nucleotide at position 3 (or the corresponding position when the anti-CD63 scFv coding sequence is aligned with SEQ ID NO: 866) is an “A.” In some embodiments, the nucleotide at position 132 (or the corresponding position when the anti-CD63 scFv coding sequence is aligned with SEQ ID NO: 866) is an “A.” In some embodiments, the nucleotide at position 273 (or the corresponding position when the anti-CD63 scFv coding sequence is aligned with SEQ ID NO: 866) is a “T.” In some embodiments, the nucleotide at position 3 (or the corresponding position when the anti-CD63 scFv coding sequence is aligned with SEQ ID NO: 866) is an “A,” the nucleotide at position 132 (or the corresponding position when the anti-CD63 scFv coding sequence is aligned with SEQ ID NO: 866) is an “A,” and the nucleotide at position 273 (or the corresponding position when the anti-CD63 scFv coding sequence is aligned with SEQ ID NO: 866) is a “T.”

[0509] In one example, the anti-CD63 scFv coding sequence is (or comprises a sequence) at least 90%, at least 91%, at least 92%, at least 93%, at least 94%, at least 95%, at least 96%, at least 97%, at least 98%, at least 99%, at least 99.5%, or 100% identical to SEQ ID NO: 867. In another example, the anti-CD63 scFv coding sequence is (or comprises a sequence) at least 90%, at least 91%, at least 92%, at least 93%, at least 94%, at least 95%, at least 96%, at least 97%, at least 98%, at least 99%, at least 99.5%, or 100% identical to SEQ ID NO: 867 and encodes an anti-CD63 scFv protein (or an anti-CD63 scFv protein comprising a sequence) at least 99%, at least 99.5%, or 100% identical to SEQ ID NO: 306. In another example, the anti-CD63 scFv coding sequence is (or comprises a sequence) at least 90%, at least 91%, at least 92%, at least 93%, at least 94%, at least 95%, at least 96%, at least 97%, at least 98%, at least 99%, at least 99.5%, or 100% identical to SEQ ID NO: 867 and encodes an anti-CD63 scFv protein comprising the sequence set forth in SEQ ID NO: 306. In another example, the anti-CD63 scFv coding sequence is (or comprises a sequence) at least 95%, at least 96%, at least 97%, at least 98%, at least 99%, at least 99.5%, or 100% identical to SEQ ID NO: 867. In another example, the anti-CD63 scFv coding sequence is (or comprises a sequence) at least 95%, at least 96%, at least 97%, at least 98%, at least 99%, at least 99.5%, or 100% identical to SEQ ID NO: 867 and encodes an anti-CD63 scFv protein (or an anti-CD63 scFv protein comprising a sequence) at least 99%, at least 99.5%, or 100% identical to SEQ ID NO: 306. In another example, the anti-CD63 scFv coding sequence is (or comprises a sequence) at least 95%, at least 96%, at least 97%, at least 98%, at least 99%, at least 99.5%, or 100% identical to SEQ ID NO: 867 and encodes an anti-CD63 scFv protein comprising the sequence set forth in SEQ ID NO: 306. In another example, the anti-CD63 scFv coding sequence is (or comprises a sequence) at least 99%, at least 99.5%, or 100% identical to SEQ ID NO: 867. In another example, the anti-CD63 scFv coding sequence is (or comprises a sequence) at least 99%, at least 99.5%, or 100% identical to SEQ ID NO: 867 and encodes an anti-CD63 scFv protein (or an anti-CD63 scFv protein comprising a sequence) at least 99%, at least 99.5%, or 100% identical to SEQ ID NO: 306. In another example, the anti-CD63 scFv coding sequence is (or comprises a sequence) at least 99%, at least 99.5%, or 100% identical to SEQ ID NO: 867 and encodes an anti-CD63 scFv protein comprising the sequence set forth in SEQ ID NO: 306. In another example, the anti-CD63 scFv coding sequence comprises the sequence set forth in SEQ ID NO: 867. In another example, the anti-CD63 scFv coding sequence consists essentially of the sequence set forth in SEQ ID NO: 867. In another example, the anti-CD63 scFv coding sequence consists of the sequence set forth in SEQ ID NO: 867. The anti-CD63 scFv coding sequence can be, for example, CpG-depleted (e.g., fully CpG-depleted) and/or codon optimized. For example, the anti-CD63 scFv coding sequence can be CpG depleted (e.g., fully CpG-depleted) and codon optimized. Optionally, the anti-CD63 scFv coding sequence encodes an anti-CD63 scFv protein (or an anti-CD63 scFv protein comprising a sequence) at least 90%, at least 91%, at least 92%, at least 93%, at least 94%, at least 95%, at least 96%, at least 97%, at least 98%, at least 99%, at least 99.5%, or 100% identical to SEQ ID NO: 306 (and, e.g., retaining CD63-binding activity). Optionally, the anti-CD63 scFv coding sequence encodes an anti-CD63 scFv protein (or an anti-CD63 scFv protein comprising a sequence) at least 95%, at least 96%, at least 97%, at least 98%, at least 99%, at least 99.5%, or 100% identical to SEQ ID NO: 306 (and, e.g., retaining CD63-binding activity). Optionally, the anti-CD63 scFv coding sequence in the above examples encodes an anti-CD63 scFv protein (or an anti-CD63 scFv protein comprising a sequence) at least 99%, at least 99.5%, or 100% identical to SEQ ID NO: 306 (and, e.g., retaining CD63-binding activity). Optionally, the anti-CD63 scFv coding sequence in the above examples encodes an anti-CD63 scFv protein comprising the sequence set forth in SEQ ID NO: 306. Optionally, the anti-CD63 scFv coding sequence in the above examples encodes an anti-CD63 scFv protein consisting essentially of the sequence set forth in SEQ ID NO: 306. Optionally, the anti-CD63 scFv coding sequence in the above examples encodes an anti-CD63 scFv protein consisting of the sequence set forth in SEQ ID NO: 306. In some embodiments, the nucleotide at position 3 (or the corresponding position when the anti-CD63 scFv coding sequence is aligned with SEQ ID NO: 866) is an “A.” In some embodiments, the nucleotide at position 132 (or the corresponding position when the anti-CD63 scFv coding sequence is aligned with SEQ ID NO: 866) is an “A.” In some embodiments, the nucleotide at position 273 (or the corresponding position when the anti-CD63 scFv coding sequence is aligned with SEQ ID NO: 866) is a “T.” In some embodiments, the nucleotide at position 3 (or the corresponding position when the anti-CD63 scFv coding sequence is aligned with SEQ ID NO: 866) is an “A,” the nucleotide at position 132 (or the corresponding position when the anti-CD63 scFv coding sequence is aligned with SEQ ID NO: 866) is an “A,” and the nucleotide at position 273 (or the corresponding position when the anti-CD63 scFv coding sequence is aligned with SEQ ID NO: 866) is a “T.”

[0510] Various anti-CD63 scFv coding sequences are provided. In one example, the anti-CD63 scFv coding sequence is (or comprises a sequence) at least 90%, at least 91%, at least 92%, at least 93%, at least 94%, at least 95%, at least 96%, at least 97%, at least 98%, at least 99%, at least 99.5%, or 100% identical to any one of SEQ ID NOS: 307-315. In another example, the anti-CD63 scFv coding sequence is (or comprises a sequence) at least 95%, at least 96%, at least 97%, at least 98%, at least 99%, at least 99.5%, or 100% identical to any one of SEQ ID NOS: 307-315. In another example, the anti-CD63 scFv coding sequence is (or comprises a sequence) at least 99%, at least 99.5%, or 100% identical to any one of SEQ ID NOS: 307-315. In another example, the anti-CD63 scFv coding sequence comprises the sequence set forth in any one of SEQ ID NOS: 307-315. In another example, the anti-CD63 scFv coding sequence consists essentially of the sequence set forth in any one of SEQ ID NOS: 307-315. In another example, the anti-CD63 scFv coding sequence consists of the sequence set forth in any one of SEQ ID NOS: 307-315. In one example, the anti-CD63 scFv coding sequence is (or comprises a sequence) at least 90%, at least 91%, at least 92%, at least 93%, at least 94%, at least 95%, at least 96%, at least 97%, at least 98%, at least 99%, at least 99.5%, or 100% identical to SEQ ID NO: 309. In another example, the anti-CD63 scFv coding sequence is (or comprises a sequence) at least 95%, at least 96%, at least 97%, at least 98%, at least 99%, at least 99.5%, or 100% identical to SEQ ID NO: 309. In another example, the anti-CD63 scFv coding sequence is (or comprises a sequence) at least 99%, at least 99.5%, or 100% identical to SEQ ID NO: 309. In another example, the anti-CD63 scFv coding sequence comprises the sequence set forth in SEQ ID NO: 309. In another example, the anti-CD63 scFv coding sequence consists essentially of the sequence set forth in SEQ ID NO: 309. In another example, the anti-CD63 scFv coding sequence consists of the sequence set forth in SEQ ID NO: 309. Optionally, the anti-CD63 scFv coding sequence encodes an anti-CD63 scFv protein (or an anti-CD63 scFv protein comprising a sequence) at least 90%, at least 91%, at least 92%, at least 93%, at least 94%, at least 95%, at least 96%, at least 97%, at least 98%, at least 99%, at least 99.5%, or 100% identical to SEQ ID NO: 306 (and, e.g., retaining CD63-binding activity). Optionally, the anti-CD63 scFv coding sequence encodes an anti-CD63 scFv protein (or an anti-CD63 scFv protein comprising a sequence) at least 95%, at least 96%, at least 97%, at least 98%, at least 99%, at least 99.5%, or 100% identical to SEQ ID NO: 306 (and, e.g., retaining CD63-binding activity). Optionally, the anti-CD63 scFv coding sequence in the above examples encodes an anti-CD63 scFv protein (or an anti-CD63 scFv protein comprising a sequence) at least 99%, at least 99.5%, or 100% identical to SEQ ID NO: 306 (and, e.g., retaining CD63-binding activity). Optionally, the anti-CD63 scFv coding sequence in the above examples encodes an anti-CD63 scFv protein comprising the sequence set forth in SEQ ID NO: 306. Optionally, the anti-CD63 scFv coding sequence in the above examples encodes an anti-CD63 scFv protein consisting essentially of the sequence set forth in SEQ ID NO: 306. Optionally, the anti-CD63 scFv coding sequence in the above examples encodes an anti-CD63 scFv protein consisting of the sequence set forth in SEQ ID NO: 306.

[0511] Various codon optimized anti-CD63 scFv coding sequences are provided. The anti-CD63 scFv coding sequence can be, for example, CpG-depleted (e.g., fully CpG depleted) and/or codon optimized (e.g., CpG depleted (e.g., fully CpG-depleted) and codon optimized). In one example, the anti-CD63 scFv coding sequence is (or comprises a sequence) at least 90%, at least 91%, at least 92%, at least 93%, at least 94%, at least 95%, at least 96%, at least 97%, at least 98%, at least 99%, at least 99.5%, or 100% identical to any one of SEQ ID NOS: 308-315. In another example, the anti-CD63 scFv coding sequence is (or comprises a sequence) at least 95%, at least 96%, at least 97%, at least 98%, at least 99%, at least 99.5%, or 100% identical to any one of SEQ ID NOS: 308-315. In another example, the anti-CD63 scFv coding sequence is (or comprises a sequence) at least 99%, at least 99.5%, or 100% identical to any one of SEQ ID NOS: 308-315. In another example, the anti-CD63 scFv coding sequence comprises the sequence set forth in any one of SEQ ID NOS: 308-315. In another example, the anti-CD63 scFv coding sequence consists essentially of the sequence set forth in any one of SEQ ID NOS: 308-315. In another example, the anti-CD63 scFv coding sequence consists of the sequence set forth in any one of SEQ ID NOS: 308-315. Optionally, the anti-CD63 scFv coding sequence encodes an anti-CD63 scFv protein (or an anti-CD63 scFv protein comprising a sequence) at least 90%, at least 91%, at least 92%, at least 93%, at least 94%, at least 95%, at least 96%, at least 97%, at least 98%, at least 99%, at least 99.5%, or 100% identical to SEQ ID NO: 306 (and, e.g., retaining CD63-binding activity). Optionally, the anti-CD63 scFv coding sequence encodes an anti-CD63 scFv protein (or an anti-CD63 scFv protein comprising a sequence) at least 95%, at least 96%, at least 97%, at least 98%, at least 99%, at least 99.5%, or 100% identical to SEQ ID NO: 306 (and, e.g., retaining CD63-binding activity). Optionally, the anti-CD63 scFv coding sequence in the above examples encodes an anti-CD63 scFv protein (or an anti-CD63 scFv protein comprising a sequence) at least 99%, at least 99.5%, or 100% identical to SEQ ID NO: 306 (and, e.g., retaining CD63-binding activity). Optionally, the anti-CD63 scFv coding sequence in the above examples encodes an anti-CD63 scFv protein comprising the sequence set forth in SEQ ID NO: 306. Optionally, the anti-CD63 scFv coding sequence in the above examples encodes an anti-CD63 scFv protein consisting essentially of the sequence set forth in SEQ ID NO: 306. Optionally, the anti-CD63 scFv coding sequence in the above examples encodes an anti-CD63 scFv protein consisting of the sequence set forth in SEQ ID NO: 306.

[0512] In one example, the anti-CD63 scFv coding sequence is (or comprises a sequence) at least 90%, at least 91%, at least 92%, at least 93%, at least 94%, at least 95%, at least 96%, at least 97%, at least 98%, at least 99%, at least 99.5%, or 100% identical to SEQ ID NO: 309. In another example, the anti-CD63 scFv coding sequence is (or comprises a sequence) at least 90%, at least 91%, at least 92%, at least 93%, at least 94%, at least 95%, at least 96%, at least 97%, at least 98%, at least 99%, at least 99.5%, or 100% identical to SEQ ID NO: 309 and encodes an anti-CD63 scFv protein (or an anti-CD63 scFv protein comprising a sequence) at least 99%, at least 99.5%, or 100% identical to SEQ ID NO: 306. In another example, the anti-CD63 scFv coding sequence is (or comprises a sequence) at least 90%, at least 91%, at least 92%, at least 93%, at least 94%, at least 95%, at least 96%, at least 97%, at least 98%, at least 99%, at least 99.5%, or 100% identical to SEQ ID NO: 309 and encodes an anti-CD63 scFv protein comprising the sequence set forth in SEQ ID NO: 306. In another example, the anti-CD63 scFv coding sequence is (or comprises a sequence) at least 95%, at least 96%, at least 97%, at least 98%, at least 99%, at least 99.5%, or 100% identical to SEQ ID NO: 309. In another example, the anti-CD63 scFv coding sequence is (or comprises a sequence) at least 95%, at least 96%, at least 97%, at least 98%, at least 99%, at least 99.5%, or 100% identical to SEQ ID NO: 309 and encodes an anti-CD63 scFv protein (or an anti-CD63 scFv protein comprising a sequence) at least 99%, at least 99.5%, or 100% identical to SEQ ID NO: 306. In another example, the anti-CD63 scFv coding sequence is (or comprises a sequence) at least 95%, at least 96%, at least 97%, at least 98%, at least 99%, at least 99.5%, or 100% identical to SEQ ID NO: 309 and encodes an anti-CD63 scFv protein comprising the sequence set forth in SEQ ID NO: 306. In another example, the anti-CD63 scFv coding sequence is (or comprises a sequence) at least 99%, at least 99.5%, or 100% identical to SEQ ID NO: 309. In another example, the anti-CD63 scFv coding sequence is (or comprises a sequence) at least 99%, at least 99.5%, or 100% identical to SEQ ID NO: 309 and encodes an anti-CD63 scFv protein (or an anti-CD63 scFv protein comprising a sequence) at least 99%, at least 99.5%, or 100% identical to SEQ ID NO: 306. In another example, the anti-CD63 scFv coding sequence is (or comprises a sequence) at least 99%, at least 99.5%, or 100% identical to SEQ ID NO: 309 and encodes an anti-CD63 scFv protein comprising the sequence set forth in SEQ ID NO: 306. In another example, the anti-CD63 scFv coding sequence comprises the sequence set forth in SEQ ID NO: 309. In another example, the anti-CD63 scFv coding sequence consists essentially of the sequence set forth in SEQ ID NO: 309. In another example, the anti-CD63 scFv coding sequence consists of the sequence set forth in SEQ ID NO: 309. The anti-CD63 scFv coding sequence can be, for example, CpG-depleted (e.g., fully CpG-depleted) and/or codon optimized. For example, the anti-CD63 scFv coding sequence can be CpG depleted (e.g., fully CpG-depleted) and codon optimized. Optionally, the anti-CD63 scFv coding sequence encodes an anti-CD63 scFv protein (or an anti-CD63 scFv protein comprising a sequence) at least 90%, at least 91%, at least 92%, at least 93%, at least 94%, at least 95%, at least 96%, at least 97%, at least 98%, at least 99%, at least 99.5%, or 100% identical to SEQ ID NO: 306 (and, e.g., retaining CD63-binding activity). Optionally, the anti-CD63 scFv coding sequence encodes an anti-CD63 scFv protein (or an anti-CD63 scFv protein comprising a sequence) at least 95%, at least 96%, at least 97%, at least 98%, at least 99%, at least 99.5%, or 100% identical to SEQ ID NO: 306 (and, e.g., retaining CD63-binding activity). Optionally, the anti-CD63 scFv coding sequence in the above examples encodes an anti-CD63 scFv protein (or an anti-CD63 scFv protein comprising a sequence) at least 99%, at least 99.5%, or 100% identical to SEQ ID NO: 306 (and, e.g., retaining CD63-binding activity). Optionally, the anti-CD63 scFv coding sequence in the above examples encodes an anti-CD63 scFv protein comprising the sequence set forth in SEQ ID NO: 306. Optionally, the anti-CD63 scFv coding sequence in the above examples encodes an anti-CD63 scFv protein consisting essentially of the sequence set forth in SEQ ID NO: 306. Optionally, the anti-CD63 scFv coding sequence in the above examples encodes an anti-CD63 scFv protein consisting of the sequence set forth in SEQ ID NO: 306.

[0513] In one example, the anti-CD63 scFv coding sequence is (or comprises a sequence) at least 90%, at least 91%, at least 92%, at least 93%, at least 94%, at least 95%, at least 96%, at least 97%, at least 98%, at least 99%, at least 99.5%, or 100% identical to SEQ ID NO: 307. In another example, the anti-CD63 scFv coding sequence is (or comprises a sequence) at least 90%, at least 91%, at least 92%, at least 93%, at least 94%, at least 95%, at least 96%, at least 97%, at least 98%, at least 99%, at least 99.5%, or 100% identical to SEQ ID NO: 307 and encodes an anti-CD63 scFv protein (or an anti-CD63 scFv protein comprising a sequence) at least 99%, at least 99.5%, or 100% identical to SEQ ID NO: 306. In another example, the anti-CD63 scFv coding sequence is (or comprises a sequence) at least 90%, at least 91%, at least 92%, at least 93%, at least 94%, at least 95%, at least 96%, at least 97%, at least 98%, at least 99%, at least 99.5%, or 100% identical to SEQ ID NO: 307 and encodes an anti-CD63 scFv protein comprising the sequence set forth in SEQ ID NO: 306. In another example, the anti-CD63 scFv coding sequence is (or comprises a sequence) at least 95%, at least 96%, at least 97%, at least 98%, at least 99%, at least 99.5%, or 100% identical to SEQ ID NO: 307. In another example, the anti-CD63 scFv coding sequence is (or comprises a sequence) at least 95%, at least 96%, at least 97%, at least 98%, at least 99%, at least 99.5%, or 100% identical to SEQ ID NO: 307 and encodes an anti-CD63 scFv protein (or an anti-CD63 scFv protein comprising a sequence) at least 99%, at least 99.5%, or 100% identical to SEQ ID NO: 306. In another example, the anti-CD63 scFv coding sequence is (or comprises a sequence) at least 95%, at least 96%, at least 97%, at least 98%, at least 99%, at least 99.5%, or 100% identical to SEQ ID NO: 307 and encodes an anti-CD63 scFv protein comprising the sequence set forth in SEQ ID NO: 306. In another example, the anti-CD63 scFv coding sequence is (or comprises a sequence) at least 99%, at least 99.5%, or 100% identical to SEQ ID NO: 307. In another example, the anti-CD63 scFv coding sequence is (or comprises a sequence) at least 99%, at least 99.5%, or 100% identical to SEQ ID NO: 307 and encodes an anti-CD63 scFv protein (or an anti-CD63 scFv protein comprising a sequence) at least 99%, at least 99.5%, or 100% identical to SEQ ID NO: 306. In another example, the anti-CD63 scFv coding sequence is (or comprises a sequence) at least 99%, at least 99.5%, or 100% identical to SEQ ID NO: 307 and encodes an anti-CD63 scFv protein comprising the sequence set forth in SEQ ID NO: 306. In another example, the anti-CD63 scFv coding sequence comprises the sequence set forth in SEQ ID NO: 307. In another example, the anti-CD63 scFv coding sequence consists essentially of the sequence set forth in SEQ ID NO: 307. In another example, the anti-CD63 scFv coding sequence consists of the sequence set forth in SEQ ID NO: 307. The anti-CD63 scFv coding sequence can be, for example, CpG-depleted (e.g., fully CpG-depleted) and/or codon optimized. For example, the anti-CD63 scFv coding sequence can be CpG depleted (e.g., fully CpG-depleted) and codon optimized. Optionally, the anti-CD63 scFv coding sequence encodes an anti-CD63 scFv protein (or an anti-CD63 scFv protein comprising a sequence) at least 90%, at least 91%, at least 92%, at least 93%, at least 94%, at least 95%, at least 96%, at least 97%, at least 98%, at least 99%, at least 99.5%, or 100% identical to SEQ ID NO: 306 (and, e.g., retaining CD63-binding activity). Optionally, the anti-CD63 scFv coding sequence encodes an anti-CD63 scFv protein (or an anti-CD63 scFv protein comprising a sequence) at least 95%, at least 96%, at least 97%, at least 98%, at least 99%, at least 99.5%, or 100% identical to SEQ ID NO: 306 (and, e.g., retaining CD63-binding activity). Optionally, the anti-CD63 scFv coding sequence in the above examples encodes an anti-CD63 scFv protein (or an anti-CD63 scFv protein comprising a sequence) at least 99%, at least 99.5%, or 100% identical to SEQ ID NO: 306 (and, e.g., retaining CD63-binding activity). Optionally, the anti-CD63 scFv coding sequence in the above examples encodes an anti-CD63 scFv protein comprising the sequence set forth in SEQ ID NO: 306. Optionally, the anti-CD63 scFv coding sequence in the above examples encodes an anti-CD63 scFv protein consisting essentially of the sequence set forth in SEQ ID NO: 306. Optionally, the anti-CD63 scFv coding sequence in the above examples encodes an anti-CD63 scFv protein consisting of the sequence set forth in SEQ ID NO: 306.

[0514] When specific anti-CD63 scFv or multidomain therapeutic protein nucleic acid constructs sequences are disclosed herein, they are meant to encompass the sequence disclosed or the reverse complement of the sequence. For example, if an anti-CD63 scFv or multidomain therapeutic protein nucleic acid construct disclosed herein consists of the hypothetical sequence 5′-CTGGACCGA-3′, it is also meant to encompass the reverse complement of that sequence (5′-TCGGTCCAG-3′). Likewise, when construct elements are disclosed herein in a specific 5′ to 3′ order, they are also meant to encompass the reverse complement of the order of those elements. One reason for this is that, in many embodiments disclosed herein, the anti-CD63 scFv or multidomain therapeutic protein nucleic acid constructs are part of a single-stranded recombinant AAV vector. Single-stranded AAV genomes are packaged as either sense (plus-stranded) or anti-sense (minus-stranded genomes), and single-stranded AAV genomes of + and − polarity are packaged with equal frequency into mature rAAV virions. See, e.g., LING et al. (2015) J. Mol. Genet. Med. 9(3):175, Zhou et al. (2008) Mol. Ther. 16(3):494-499, and Samulski et al. (1987) J. Virol. 61:3096-3101, each of which is herein incorporated by reference in its entirety for all purposes.

### (4) TfR-Binding Delivery Domain

[0515] The multidomain therapeutic proteins disclosed herein can comprise a TfR-binding delivery domain fused to a GAA. See, e.g., PCT/US2023/061858 and U.S. Ser. No. 18/163,698, each of which is herein incorporated by reference in its entirety for all purposes. The TfR-binding domain provides binding to the internalization factor transferrin receptor protein 1 (TfR; UniProt Ref. P02786). TfR (also known as TR, TfR1, and Trfr) is encoded by the TFRC gene. TfR is expressed in muscle and on brain endothelial cells. Transcytosis of TfR in these cells enables blood-brain-barrier crossing. In some embodiments, the multidomain therapeutic proteins comprising a TfR-binding delivery domain (e.g., scFv) fused to a GAA do not alter transferrin uptake. In some embodiments, the multidomain therapeutic proteins comprising a TfR-binding delivery domain (e.g., scFv) fused to a GAA do not alter iron homeostasis. In some embodiments, the multidomain therapeutic proteins comprising a TfR-binding delivery domain (e.g., scFv) fused to a GAA do not alter transferrin uptake or iron homeostasis.

[0516] Transferrin receptor 1 (TfR) is a membrane receptor involved in the control of iron supply to the cell through the binding of transferrin, the major iron-carrier protein. Transferrin receptor 1 is expressed from the TFRC gene. Transferrin receptor 1 may be referred to, herein, at TFRC. This receptor plays a key role in the control of cell proliferation because iron is essential for sustaining ribonucleotide reductase activity, and is the only enzyme that catalyzes the conversion of ribonucleotides to deoxyribonucleotides. Preferably, the TfR is human TfR (hTfR). See e.g., Accession numbers NP_001121620.1; BAD92491.1; and NP_001300894.1; and e!Ensembl entry: ENSG00000072274. The human transferrin receptor 1 is expressed in several tissues, including but not limited to: cerebral cortex; cerebellum; hippocampus; caudate; parathyroid gland; adrenal gland; bronchus; lung; oral mucosa; esophagus; stomach; duodenum; small intestine; colon; rectum; liver; gallbladder; pancreas; kidney; urinary bladder; testis; epididymis; prostate; vagina; ovary; fallopian tube; endometrium; cervix; placenta; breast; heart muscle; smooth muscle; soft tissue; skin; appendix; lymph node; tonsil; and bone marrow. A related transferrin receptor is transferrin receptor 2 (TfR2). Human transferrin receptor 2 bears about 45% sequence identity to human transferrin receptor 1. Trinder & Baker, Transferrin receptor 2: a new molecule in iron metabolism. Int J Biochem Cell Biol. 2003 March; 35(3):292-6. Unless otherwise stated, transferrin receptor as used herein generally refers to transferrin receptor 1 (e.g., human transferrin receptor 1).

[0517] Human Transferrin (Tf) is a single chain, 80 kDa member of the anion-binding superfamily of proteins. Transferrin is a 698 amino acid precursor that is divided into a 19 aa signal sequence plus a 679 aa mature segment that typically contains 19 intrachain disulfide bonds. The N- and C-terminal flanking regions (or domains) bind ferric iron through the interaction of an obligate anion (e.g., bicarbonate) and four amino acids (His, Asp, and two Tyr). Apotransferrin (or iron-free) will initially bind one atom of iron at the C-terminus, and this is followed by subsequent iron binding by the N-terminus to form holotransferrin (diferric Tf, Holo-Tf). Through its C-terminal iron-binding domain, holotransferrin will interact with the TfR on the surface of cells where it is internalized into acidified endosomes. Iron dissociates from the Tf molecule within these endosomes, and is transported into the cytosol as ferrous iron. In addition to TfR, transferrin is reported to bind to cubulin, IGFBP3, microbial iron-binding proteins and liver-specific TfR2.

[0518] The blood-brain barrier (BBB) is located within the microvasculature of the brain, and it regulates passage of molecules from the blood to the brain. Burkhart et al., Accessing targeted nanoparticles to the brain: the vascular route. Curr Med Chem. 2014; 21(36):4092-9. The transcellular passage through the brain capillary endothelial cells can take place via 1) cell entry by leukocytes; 2) carrier-mediated influx of e.g., glucose by glucose transporter 1 (GLUT-1), amino acids by e.g., the L-type amino acid transporter 1 (LAT-1) and small peptides by e.g., organic anion-transporting peptide-B (OATP-B); 3) paracellular passage of small hydrophobic molecules; 4) adsorption-mediated transcytosis of e.g., albumin and cationized molecules; 5) passive diffusion of lipid soluble, non-polar solutes, including CO₂ and O₂; and 5) receptor-mediated transcytosis of, e.g., insulin by the insulin receptor and Tf by the TfR. Johnsen et al., Targeting the transferrin receptor for brain drug delivery, Prog Neurobiol. 2019 October; 181:101665.

[0519] For example, anti-TfR:GAA fusion proteins exhibiting high affinity to the transferrin receptor and superior blood-brain barrier crossing are provided. Surprisingly, fusions exhibiting high binding affinity to TfR crossed the blood-brain barrier more efficiently than that of low affinity binders. The fusions of the present invention have an ability to efficiently deliver GAA to the brain and, thus, are an effective treatment of glycogen storage diseases such as Pompe Disease.

[0520] Provided herein are antigen-binding proteins, such as antibodies, antigen-binding fragments thereof, such as Fabs and scFvs, that bind specifically to the transferrin receptor, preferably the human transferrin receptor 1 (anti-hTfR). For example, in an embodiment, the anti-hTfR is in the form of a fusion protein. The fusion protein includes the anti-hTfR antigen-binding protein fused to GAA. The anti-hTfRs efficiently cross the blood-brain barrier (BBB) and can, thereby, deliver the fused GAA to the brain.

[0521] An antigen-binding protein that specifically binds to transferrin receptor and fusions thereof, for example, a tag such as His₆ and/or myc (e.g., human transferrin receptor (e.g., REGN2431) or monkey transferrin receptor (e.g., REGN2054)) binds at about 25° C., e.g., in a surface plasmon resonance assay, with a K_{D} of about 20 nM or a higher affinity. Such an antigen-binding protein may be referred to as “anti-TfR.”

[0522] In an embodiment, an anti-hTfR scFv:GAA fusion protein includes an scFv comprising the arrangement of variable regions as follows LCVR-HCVR or HCVR-LCVR, wherein the HCVR and LCVR are optionally connected by a linker and the scFv is connected, optionally by a linker, to GAA (e.g., LCVR-(Gly₄Ser)₃-HCVR-(Gly₄Ser)₂)-GAA; or LCVR-(Gly₄Ser)₃-HCVR-(Gly₄Ser)₂)-GAA) (Gly₄Ser=SEQ ID NO: 718)). In one example, the linker between the HCVR and LCVR comprises, consists essentially of, or consists of three such repeats (SEQ ID NO: 828). For example, the coding sequence for the linker can comprise, consist essentially of, or consist of any one of SEQ ID NOS: 830-834 and 854. In another example, the linker between the HCVR and LCVR comprises, consists essentially of, or consists of two such repeats (SEQ ID NO: 829). For example, the coding sequence for the linker can comprise, consist essentially of, or consist of any one of SEQ ID NOS: 835-841. In another example, the linker between the HCVR and LCVR comprises, consists essentially of, or consists of one such repeat (SEQ ID NO: 718). For example, the coding sequence for the linker can comprise, consist essentially of, or consist of SEQ ID NO: 842 or 855. In one example, the linker between the scFv and GAA comprises, consists essentially of, or consists of three such repeats (SEQ ID NO: 828). For example, the coding sequence for the linker can comprise, consist essentially of, or consist of any one of SEQ ID NOS: 830-834 and 854. In another example, the linker between the scFv and GAA comprises, consists essentially of, or consists of two such repeats (SEQ ID NO: 829). For example, the coding sequence for the linker can comprise, consist essentially of, or consist of any one of SEQ ID NOS: 835-841. In another example, the linker between the scFv and GAA comprises, consists essentially of, or consists of one such repeat (SEQ ID NO: 718). For example, the coding sequence for the linker can comprise, consist essentially of, or consist of SEQ ID NO: 842 or 855.

[0523] An anti-hTfR:GAA optionally comprises a signal peptide, connected to the antigen-binding protein that binds specifically to transferrin receptor (TfR), preferably, human transferrin receptor (hTfR) which is fused (optionally by a linker) to GAA. In an embodiment, the signal peptide is the mROR signal sequence (e.g., mROR signal sequence-LCVR-(Gly₄Ser)₃-HCVR-(Gly₄Ser)₂)-GAA; or LCVR-(Gly₄Ser)₃-HCVR-(Gly₄Ser)₂)-GAA) (Gly₄Ser=SEQ ID NO: 718)). The term “fused” or “tethered” with regard to fused polypeptides refers to polypeptides joined directly or indirectly (e.g., via a linker or other polypeptide).

[0524] In an embodiment of the invention, the assignment of amino acids to each framework or CDR domain in an immunoglobulin is in accordance with the definitions of Sequences of Proteins of Immunological Interest, Kabat et al.; National Institutes of Health, Bethesda, Md.; 5^{th} ed.; NIH Publ. No. 91-3242 (1991); Kabat (1978) Adv. Prot. Chem. 32:1-75; Kabat et al., (1977) J. Biol. Chem. 252:6609-6616; Chothia, et al., (1987) J Mol. Biol. 196:901-917 or Chothia, et A, (1989) Nature 342: 878-883. Thus, included are antibodies and antigen-binding fragments including the CDRs of a V_{H} and the CDRs of a V_{L}, which V_{H} and V_{L} comprise amino acid sequences as set forth herein (see, e.g., sequences of Table 3, or variants thereof), wherein the CDRs are as defined according to Kabat and/or Chothia.

TABLE 3
Domains in Anti-hTfR Antibodies, Antigen-binding Fragments (e.g.,
Fabs) or scFv Molecules in Fusion Proteins and SEQ ID NOs.

| | anti-hTfR | HC- | HC- | | | | LC- | LC- | | | |
|---|---|---|---|---|---|---|---|---|---|---|---|
| # | Molecule | VRNT | VRAA | HCDR1 | HCDR2 | HCDR3 | VRNT | VRAA | LCDR1 | LCDR2 | LCDR3 |
| 1 | 31874B | 334 | 335 | 336 | 337 | 338 | 339 | 340 | 341 | 342 | 343 |
| 2 | 31863B | 344 | 345 | 346 | 347 | 348 | 349 | 350 | 351 | 352 | 353 |
| 3 | 69348 | 354 | 355 | 356 | 357 | 358 | 359 | 360 | 361 | 362 | 363 |
| 4 | 69340 | 364 | 365 | 366 | 367 | 368 | 369 | 370 | 371 | 372 | 373 |
| 5 | 69331 | 374 | 375 | 376 | 377 | 378 | 379 | 380 | 381 | 382 | 383 |
| 6 | 69332 | 384 | 385 | 386 | 387 | 388 | 389 | 390 | 391 | 392 | 393 |
| 7 | 69326 | 394 | 395 | 396 | 397 | 398 | 399 | 400 | 401 | 402 | 403 |
| 8 | 69329 | 404 | 405 | 406 | 407 | 408 | 409 | 410 | 411 | 412 | 413 |
| 9 | 69323 | 414 | 415 | 416 | 417 | 418 | 419 | 420 | 421 | 422 | 423 |
| 10 | 69305 | 424 | 425 | 426 | 427 | 428 | 429 | 430 | 431 | 432 | 433 |
| 11 | 69307 | 434 | 435 | 436 | 437 | 438 | 439 | 440 | 441 | 442 | 443 |
| 12 | 12795B | 444 | 445 | 446 | 447 | 448 | 449 | 450 | 451 | 452 | 453 |
| 13 | 12798B | 454 | 455 | 456 | 457 | 458 | 459 | 460 | 461 | 462 | 463 |
| 14 | 12799B | 464 | 465 | 466 | 467 | 468 | 469 | 470 | 471 | 472 | 473 |
| 15 | 12801B | 474 | 475 | 476 | 477 | 478 | 479 | 480 | 481 | 482 | 483 |
| 16 | 12802B | 484 | 485 | 486 | 487 | 488 | 489 | 490 | 491 | 492 | 493 |
| 17 | 12808B | 494 | 495 | 496 | 497 | 498 | 499 | 500 | 501 | 502 | 503 |
| 18 | 12812B | 504 | 505 | 506 | 507 | 508 | 509 | 510 | 511 | 512 | 513 |
| 19 | 12816B | 514 | 515 | 516 | 517 | 518 | 519 | 520 | 521 | 522 | 523 |
| 20 | 12833B | 524 | 525 | 526 | 527 | 528 | 529 | 530 | 531 | 532 | 533 |
| 21 | 12834B | 534 | 535 | 536 | 537 | 538 | 539 | 540 | 541 | 542 | 543 |
| 22 | 12835B | 544 | 545 | 546 | 547 | 548 | 549 | 550 | 551 | 552 | 553 |
| 23 | 12847B | 554 | 555 | 556 | 557 | 558 | 559 | 560 | 561 | 562 | 563 |
| 24 | 12848B | 564 | 565 | 566 | 567 | 568 | 569 | 570 | 571 | 572 | 573 |
| 25 | 12843B | 574 | 575 | 576 | 577 | 578 | 579 | 580 | 581 | 582 | 583 |
| 26 | 12844B | 584 | 585 | 586 | 587 | 588 | 589 | 590 | 591 | 592 | 593 |
| 27 | 12845B | 594 | 595 | 596 | 597 | 598 | 599 | 600 | 601 | 602 | 603 |
| 28 | 12839B | 604 | 605 | 606 | 607 | 608 | 609 | 610 | 611 | 612 | 613 |
| 29 | 12841B | 614 | 615 | 616 | 617 | 618 | 619 | 620 | 621 | 622 | 623 |
| 30 | 12850B | 624 | 625 | 626 | 627 | 628 | 629 | 630 | 631 | 632 | 633 |
| 31 | 69261 | 634 | 635 | 636 | 637 | 638 | 639 | 640 | 641 | 642 | 643 |
| 32 | 69263 | 644 | 645 | 646 | 647 | 648 | 649 | 650 | 651 | 652 | 653 |

31874B
HCVR (V_{H}) Nucleotide Sequence
(SEQ ID NO: 334)
GAGGTGCAGCTGGTGGAGTCTGGGGGAGGCTTGGTACAGCCTGGGGGGTCCCTGA
GACTCTCCTGTGCAGCCTCTGGATTCGCCTTTAGCAGCTATGCCATGACCTGGGT
CCGACAGGCTCCAGGGAAGGGGCTGGAGTGGGTCTCAGTTATCAGTGGTACTGGT
GGTAGTACATACTACGCAGACTCCGTGAAGGGCCGGTTCACCATCTCCAGAGACA
ATTCCAAGAACACGCTGTATCTACAAATGAACAGCCTGAGAGCCGAGGACACGGC
CGTATATTACTGTGCGAAAGGGGGAGCAGCTCGTAGAATGGAATACTTCCAGTAC
TGGGGCCAGGGCACCCTGGTCACCGTCTCCTCA
HCVR (V_{H}) Amino Acid Sequence
(SEQ ID NO: 335)
EVQLVESGGGLVQPGGSLRLSCAASGFAFSSYAMTWVRQAPGKGLEWVSVISGTG
GSTYYADSVKGRFTISRDNSKNTLYLQMNSLRAEDTAVYYCAKGGAARRMEYFQY
WGQGTLVTVSS
HCDR1:
(SEQ ID NO: 336)
GFAFSSYA
HCDR2:
(SEQ ID NO: 337)
ISGTGGST
HCDR3:
(SEQ ID NO: 338)
AKGGAARRMEYFQY
LCVR (V_{L}) Nucleotide Sequence
(SEQ ID NO: 339)
GACATCCAGATGACCCAGTCTCCATCCTCCCTGTCTGCATCTGTAGGAGACAGAG
TCACCATCACTTGCCGGGCGAGTCAGGGCATTAGCAATTATTTAGCCTGGTATCA
GCAGAAACCAGGGAAAGTTCCTAACCTCCTTATCTATGCTGCATCCACTTTGCAA
TCAGGGGTCCCATCTCGATTCAGTGGCAGTGGATCTGGGACAGATTTCACTCTCA
CCATCAGCAGCCTGCAGCCTGAAGATGTTGCAACTTATTACTGTCAAAAGTATAA
CAGTGCCCCTCTCACTTTCGGCGGAGGGACCAAGGTGGAGATCAAA
LCVR (V_{L}) Amino Acid Sequence
(SEQ ID NO: 340)
DIQMTQSPSSLSASVGDRVTITCRASQGISNYLAWYQQKPGKVPNLLIYAASTLQ
SGVPSRFSGSGSGTDFTLTISSLQPEDVATYYCQKYNSAPLTFGGGTKVEIK
LCDR1:
(SEQ ID NO: 341)
QGISNY
LCDR2:
(SEQ ID NO: 342)
AAS
LCDR3:
(SEQ ID NO: 343)
QKYNSAPLT
31863B
HCVR (V_{H}) Nucleotide Sequence
(SEQ ID NO: 344)
GAGGTGCAGCTGGTGGAGTCTGGGGGAGGCTTGGTACAGCCTGGGGGGTCCCTGA
GACTCTCCTGTGCAGCCTCTGGATTCACCTTTAACAGCTATGCCATGACCTGGGT
CCGCCAGGCTCCAGGGAAGGGGCTGGAGTGGGTCTCATTTATTGGTGGTAGTACT
GGTAACACATACTACGCAGGCTCCGTGAAGGGCCGGTTCACCATCTCCAGCGACA
ATTCCAAGAAGACGCTGTATCTGCAAATGAACAGCCTGAGAGCCGAGGACACGGC
CGTATATTACTGTGCGAAAGGGGGAGCAGCTCGTAGAATGGAATACTTCCAGCAC
TGGGGCCAGGGCACCCTGGTCACCGTCTCCTCA
HCVR (V_{H}) Amino Acid Sequence
(SEQ ID NO: 345)
EVQLVESGGGLVQPGGSLRLSCAASGFTFNSYAMTWVRQAPGKGLEWVSFIGGST
GNTYYAGSVKGRFTISSDNSKKTLYLQMNSLRAEDTAVYYCAKGGAARRMEYFQH
WGQGTLVTVSS
HCDR1:
(SEQ ID NO: 346)
GFTFNSYA
HCDR2:
(SEQ ID NO: 347)
IGGSTGNT
HCDR3:
(SEQ ID NO: 348)
AKGGAARRMEYFQH
LCVR (V_{L}) Nucleotide Sequence
(SEQ ID NO: 349)
GACATCCAGATGACCCAGTCTCCATCCTCCCTGTCTGCATCTATAGGAGACAGAG
TCACCATCACTTGCCGGGCGAGTCAGGGCATTAGCAATTATTTAGCCTGGTATCA
ACAGAAACCAGGGAAAGTTCCTAAGCTCCTGATCTATGCTGCATCCACTTTGCAA
TCAGGGGTCCCATCTCGGTTCAGTGGCAGTGGATCTGGGACAGATTTCACTCTCA
CCATCAGCAGCCTGCAGCCTGAAGATGTTGCAACTTATTACTGTCAAAACCATAA
CAGTGTCCCTCTCACTTTCGGCGGAGGGACCAAGGTGGAGATCAAA
LCVR (V_{L}) Amino Acid Sequence
(SEQ ID NO: 350)
DIQMTQSPSSLSASIGDRVTITCRASQGISNYLAWYQQKPGKVPKLLIYAASTLQ
SGVPSRFSGSGSGTDFTLTISSLQPEDVATYYCQNHNSVPLTFGGGTKVEIK
LCDR1:
(SEQ ID NO: 351)
QGISNY
LCDR2:
(SEQ ID NO: 352)
AAS
LCDR3:
(SEQ ID NO: 353)
QNHNSVPLT
69348
HCVR (V_{H}) Nucleotide Sequence
(SEQ ID NO: 354)
CAGGTGCAGCTGGTGGAGTCTGGGGGAGGCGTGGTCCAGCCTGGGAGGTCCCTGA
GACTCTCCTGTGCAGCGTCTGGATTCACCTTCACTACCTATGGCATGCACTGGGT
CCGCCAGGCTCCAGGCAAGGGGCTGGAGTGGGTGGCTGTTATATGGTATGATGGA
AGTAATAAATATTATGGAGACTCCGTGAAGGGCCGATTCACCATCTCCAGAGACA
ATTCCAAGAACACACTGTATCTGCAAATGAACAGCCTGAGAGTCGACGACACGGC
TGTTTATTACTGTACGAGAACCCATGGCTATACCAGGTCGTCGGACGGTTTTGAC
TACTGGGGCCAGGGAACCCTGGTCACCGTCTCCTCA
HCVR (V_{H}) Amino Acid Sequence
(SEQ ID NO: 355)
QVQLVESGGGVVQPGRSLRLSCAASGFTFTTYGMHWVRQAPGKGLEWVAVIWYDG
SNKYYGDSVKGRFTISRDNSKNTLYLQMNSLRVDDTAVYYCTRTHGYTRSSDGFD
YWGQGTLVTVSS
HCDR1:
(SEQ ID NO: 356)
GFTFTTYG
HCDR2:
(SEQ ID NO: 357)
IWYDGSNK
HCDR3:
(SEQ ID NO: 358)
TRTHGYTRSSDGFDY
LCVR (V_{L}) Nucleotide Sequence
(SEQ ID NO: 359)
GACATCCAGATGACCCAGTCTCCATCCTCCCTGTCTGCATCTGTAGGAGACAGAG
TCACCATCACTTGCCGGGCAAGTCAGAGCATTAGAAATGTTTTAGGCTGGTTTCA
GCAGAAACCAGGGAAAGCCCCTCAGCGCCTGATCTATGCTGCATCCAGTTTGCAA
AGTGGGGTCCCATCAAGGTTCAGCGGCAGTGGATCTGGGACAGAATTCACTCTCA
CAATCAGCAGCCTACAGCCTGAAGATTTTGCAACTTATTACTGTCTACAGCATAA
TTTTTACCCGCTCACTTTCGGCGGAGGGACCAAGGTGGAGATCAAA
LCVR (V_{L}) Amino Acid Sequence
(SEQ ID NO: 360)
DIQMTQSPSSLSASVGDRVTITCRASQSIRNVLGWFQQKPGKAPQRLIYAASSLQ
SGVPSRFSGSGSGTEFTLTISSLQPEDFATYYCLQHNFYPLTFGGGTKVEIK
LCDR1:
(SEQ ID NO: 361)
QSIRNV
LCDR2:
(SEQ ID NO: 362)
AAS
LCDR3:
(SEQ ID NO: 363)
LOHNFYPLT
69340
HCVR (V_{H}) Nucleotide Sequence
(SEQ ID NO: 364)
GAAGTGCAGCTGGTGGAGTCTGGGGGAGGCTTGGTACAGCCTGGCAGGTCCCTGA
GACTCTCCTGTGCAGCCTCTGGATTCACCTTTGATGATAAAGCCATGCACTGGGT
CCGGCAAGTTCCAGGGAAGGGCCTGGAATGGATCTCAGGTATTAGTTGGAATAGT
GGTACTATAGGCTATGCGGACTCTGTGAAGGGCCGATTCATCATCTCCAGAGACA
ACGCCAAGAACTCCCTGTATCTACAAATGAACAGTCTGAGAGCTGAGGACACGGC
CTTGTATTACTGCGCAAAAGATGGAGATACCAGTGGCTGGTACTGGTACGGTTTG
GACGTCTGGGGCCAAGGGACCACGGTCACCGTCTCCTCA
HCVR (V_{H}) Amino Acid Sequence
(SEQ ID NO: 365)
EVQLVESGGGLVQPGRSLRLSCAASGFTFDDKAMHWVRQVPGKGLEWISGISWNS
GTIGYADSVKGRFIISRDNAKNSLYLQMNSLRAEDTALYYCAKDGDTSGWYWYGL
DVWGQGTTVTVSS
HCDR1:
(SEQ ID NO: 366)
GFTFDDKA
HCDR2:
(SEQ ID NO: 367)
ISWNSGTI
HCDR3:
(SEQ ID NO: 368)
AKDGDTSGWYWYGLDV
LCVR (V_{L}) Nucleotide Sequence
(SEQ ID NO: 369)
GAAATTGTGTTGACACAGTCTCCTGCCACCCTGTCTTTGTCTCCAGGGGAAAGAG
CCACCCTCTCCTGCAGGGCCAGTCAGAGTGTTAGCAGCTACTTAGCCTGGTACCA
ACAGAAACCTGGCCAGGCTCCCAGGCTCCTCATCCATGATGTATCCAACAGGGCC
ACTGGCATCCCAGCCAGGTTCAGTGGCAGTGGGTCTGGGACAGACTTCACTCTCA
CCATCAGCAGTCTAGAGCCTGAAGATTTTGTAGTTTATTACTGTCAGCAGCGTAG
CGACTGGCCCATCACCTTCGGCCAAGGGACACGACTGGAGATTAAA
LCVR (V_{L}) Amino Acid Sequence
(SEQ ID NO: 370)
EIVLTQSPATLSLSPGERATLSCRASQSVSSYLAWYQQKPGQAPRLLIHDVSNRA
TGIPARFSGSGSGTDFTLTISSLEPEDFVVYYCQQRSDWPITFGQGTRLEIK
LCDR1:
(SEQ ID NO: 371)
QSVSSY
LCDR2:
(SEQ ID NO: 372)
DVS
LCDR3:
(SEQ ID NO: 373)
QQRSDWPIT
69331
HCVR (V_{H}) Nucleotide Sequence
(SEQ ID NO: 374)
CAGGTGCAGCTGGTGGAGTCTGGGGGAGGCGTGGTCCAGCCTGGGAGGTCCCTGA
GACTCTCCTGTATAGCCTCTGGATTCACCTTCAGTGTCTATGGCATTCACTGGGT
CCGCCAGGCTCCAGGCAAGGGGCTGGAGTGGATGGCAGTAATATCACATGATGGA
AATATTAAACACTATGCAGACTCCGTGAAGGGCCGATTCACCATCTCCAGAGACA
ATTCCAAGAACACGCTGTATCTTCAAATTAACAGCCTGAGAACTGAGGACACGGC
TGTGTATTACTGTGCGAAAGATACCTGGAACTCCCTTGATACTTTTGATATCTGG
GGCCAAGGGACAATGGTCACCGTCTCTTCA
HCVR (V_{H}) Amino Acid Sequence
(SEQ ID NO: 375)
QVQLVESGGGVVQPGRSLRLSCIASGFTFSVYGIHWVRQAPGKGLEWMAVISHDG
NIKHYADSVKGRFTISRDNSKNTLYLQINSLRTEDTAVYYCAKDTWNSLDTFDIW
GQGTMVTVSS
HCDR1:
(SEQ ID NO: 376)
GFTFSVYG
HCDR2:
(SEQ ID NO: 377)
ISHDGNIK
HCDR3:
(SEQ ID NO: 378)
AKDTWNSLDTFDI
LCVR (V_{L}) Nucleotide Sequence
(SEQ ID NO: 379)
GACATCCAGTTGACCCAGTCTCCATCCTCCCTGTCTGCATCTGTAGGAGACAGAG
TCACCATCACTTGCTGGGCCAGTCAGGGCATTAGCAGTTATTTAGCCTGGTATCA
GCAAAAACCAGGGAAAGCCCCTAAGCTCCTGATCTATGCTGCATCCACTTTGCAA
AGTGGGGTCCCATCAAGGTTCAGCGGCAGTGGATCTGGGACAGAATTCACTCTCA
CAATCAGCAGCCTGCAGCCTGAAGATTTTGCAACTTATTACTGTCAACAGCTTAA
TAGTTACCCTCTCACTTTCGGCGGAGGGACCAAGGTGGAGATCAAA
LCVR (V_{L}) Amino Acid Sequence
(SEQ ID NO: 380)
DIQLTQSPSSLSASVGDRVTITCWASQGISSYLAWYQQKPGKAPKLLIYAASTLQ
SGVPSRFSGSGSGTEFTLTISSLQPEDFATYYCQQLNSYPLTFGGGTKVEIK
LCDR1:
(SEQ ID NO: 381)
QGISSY
LCDR2:
(SEQ ID NO: 382)
AAS
LCDR3:
(SEQ ID NO: 383)
QQLNSYPLT
69332
HCVR (V_{H}) Nucleotide Sequence
(SEQ ID NO: 384)
CAGGTCACCTTGAGGGAGTCTGGTCCCGCGCTGGTGAAACCCTCACAGACCCTCA
CACTGACCTGCACCTTCTCTGGATTCTCACTCAACACTTATGGGATGTTTGTGAG
CTGGATCCGTCAGCCTCCAGGGAAGGCCCTAGAGTGGCTTGCACACATTCATTGG
GATGATGATAAATACTACAGCACATCTCTGAAGACCAGGCTCACCATCTCCAAGG
ACACCTCCAAAAACCAGGTGGTCCTTACAATGACCAACATGGACCCTGTGGACAC
AGCCACGTATTATTGTGCACGGGGGCACAATAATTTGAACTACATCATCCACTGG
GGCCAGGGAACCCTGGTCACCGTCTCCTCA
HCVR (V_{H}) Amino Acid Sequence
(SEQ ID NO: 385)
QVTLRESGPALVKPSQTLTLTCTFSGFSLNTYGMFVSWIRQPPGKALEWLAHIHW
DDDKYYSTSLKTRLTISKDTSKNQVVLTMTNMDPVDTATYYCARGHNNLNYIIHW
GQGTLVTVSS
HCDR1:
(SEQ ID NO: 386)
GFSLNTYGMF
HCDR2:
(SEQ ID NO: 387)
IHWDDDK
HCDR3:
(SEQ ID NO: 388)
ARGHNNLNYIIH
LCVR (V_{L}) Nucleotide Sequence
(SEQ ID NO: 389)
GCCATCCAGATGACCCAGTCTCCATCCTCCCTGTCTGCATCTGTAGGAGACAGAG
TCACCATCACTTGCCGGGCAAGTCAGGGCATTAGAAATGATTTAGGCTGGTATCA
GCAGAAACCAGGGAAAGCCCCTAAGCTCCTGATCTATGCTGCATCCACTTTACAA
AGTGGGGTCCCATCAAGGTTCAGCGGCAGTGGATCTGGCACAGATTTCACTCTCA
CCATCAGCAGCCTGCAGCCTGAAGATTTTGCAACTTATTACTGTCTACAAGATTA
CAATTACCCATTCACTTTCGGCCCTGGGACCAAAGTGGATATCAAA
LCVR (V_{L}) Amino Acid Sequence
(SEQ ID NO: 390)
AIQMTQSPSSLSASVGDRVTITCRASQGIRNDLGWYQQKPGKAPKLLIYAASTLQ
SGVPSRFSGSGSGTDFTLTISSLQPEDFATYYCLQDYNYPFTFGPGTKVDIK
LCDR1:
(SEQ ID NO: 391)
QGIRND
LCDR2:
(SEQ ID NO: 392)
AAS
LCDR3:
(SEQ ID NO: 393)
LQDYNYPFT
69326
HCVR (V_{H}) Nucleotide Sequence
(SEQ ID NO: 394)
GAGGTGCAGCTGGTGGAGTCTGGGGGAGGCTTGGTACAGCCTGGAGGGTCCCTGA
GACTCTCCTGTGCAGTCTCTGGATTCATCTTCAGTAGTTATGAAATGAACTGGGT
CCGCCAGGCTCCAGGGAAGGGGCTGGAGTGGGTTTCATACATTAGTAGTAGTGGT
AGTACCATATTCTACGCAGACTCTGTGAAGGGCCGATTCACCATCTCCAGAGACA
ACGCCAAGAACTCACTGTATCTGCAAATGAACAGCCTGAGAGCCGAGGACACGGC
TGTTTATTACTGTGTGTCTGGAGTGGTCCTTTTTGATGTCTGGGGCCAAGGGACA
ATGGTCACCGTCTCTTCA
HCVR (V_{H}) Amino Acid Sequence
(SEQ ID NO: 395)
EVQLVESGGGLVQPGGSLRLSCAVSGFIFSSYEMNWVRQAPGKGLEWVSYISSSG
STIFYADSVKGRFTISRDNAKNSLYLQMNSLRAEDTAVYYCVSGVVLFDVWGQGT
MVTVSS
HCDR1:
(SEQ ID NO: 396)
GFIFSSYE
HCDR2:
(SEQ ID NO: 397)
ISSSGSTI
HCDR3:
(SEQ ID NO: 398)
VSGVVLFDV
LCVR (V_{L}) Nucleotide Sequence
(SEQ ID NO: 399)
GAAATAGTGATGACGCAGTCTCCAGCCACCCTGTCTGTGTCTCCGGGGGAAAGAG
CCACCCTCTCCTGCAGGGCCAGTCAGAGTGTTAGCAGCAACTTTGCCTGGTACCA
ACAGAAACCTGGCCAGGCTCCCAGGCTCCTCATCTATAGTGCATCCTCCAGGGCC
ACTGGTATCCCAGTCAGGTTCAGTGGCAGTGGGTCTGGGACAGAGTTCACTCTCA
CCATCAGCAGCCTGCAGTCTGAAGATTTTGCAGTTTATTACTGTCAGCAGTATAA
TATCTGGCCTCGGACGTTCGGCCAAGGGACCAAGGTGGAAATCAAA
LCVR (V_{L}) Amino Acid Sequence
(SEQ ID NO: 400)
EIVMTQSPATLSVSPGERATLSCRASQSVSSNFAWYQQKPGQAPRLLIYSASSRA
TGIPVRFSGSGSGTEFTLTISSLQSEDFAVYYCQQYNIWPRTFGQGTKVEIK
LCDR1:
(SEQ ID NO: 401)
QSVSSN
LCDR2:
(SEQ ID NO: 402)
SAS
LCDR3:
(SEQ ID NO: 403)
QQYNIWPRT
69329
HCVR (V_{H}) Nucleotide Sequence
(SEQ ID NO: 404)
GAGGTGCAGCTGGTGGAGTCTGGGGGAGGCTTGGTCCAGCCTGGGGGGTCCCTGA
GACTCTCCTGTGCAGCCTCTGGATTCACCTTTAGTAACTATTGGATGACCTGGGT
CCGCCAGGCTCCAGGGAAGGGGCTGGAGTGGGTGGCCAACATAAAGGAAGATGGA
AGTGAGAAAGACTATGTGGACTCTGTGAAGGGCCGATTCACCATCTCCAGAGACA
ACGCCAAGAACTCACTGTATCTGCAAATGAACAGCCTGAGAGGCGAGGACACGGC
TGTGTATTACTGTGCGAGAGATGGGGAGCAGCTCGTCGATTACTACTACTACTAC
GTTATGGACGTCTGGGGCCAAGGGACCACGGTCACCGTCTCCTCA
HCVR (V_{H}) Amino Acid Sequence
(SEQ ID NO: 405)
EVQLVESGGGLVQPGGSLRLSCAASGFTFSNYWMTWVRQAPGKGLEWVANIKEDG
SEKDYVDSVKGRFTISRDNAKNSLYLQMNSLRGEDTAVYYCARDGEQLVDYYYYY
VMDVWGQGTTVTVSS
HCDR1:
(SEQ ID NO: 406)
GFTFSNYW
HCDR2:
(SEQ ID NO: 407)
IKEDGSEK
HCDR3:
(SEQ ID NO: 408)
ARDGEQLVDYYYYYVMDV
LCVR (V_{L}) Nucleotide Sequence
(SEQ ID NO: 409)
GACATCCAGATGACCCAGTCTCCATCTTCCGTGTCTGCATCTGTAGGAGACAGAG
TCACCATCACTTGTCGGGCGAGTCAGGGTATTAGCAGCTGGTTAGCCTGGTATCA
GCAGAAACCAGGGAAAGCCCCTAAGCTCCTGATCTATGCTGCATCCAGTTTGCAA
AGTGGGGTCCCATCAAGGTTCAGCGGCAGTGGATCTGGGACAGATTTCACTCTCA
CCATCAGCAGCCTGCAGCCTGAAGATTTTGCAACTTACTATTGTCAAAAGGCTAA
CAGTTTCCCGTACACTTTTGGCCAGGGGACCAAGCTGGAGATCAAA
LCVR (V_{L}) Amino Acid Sequence
(SEQ ID NO: 410)
DIQMTQSPSSVSASVGDRVTITCRASQGISSWLAWYQQKPGKAPKLLIYAASSLQ
SGVPSRFSGSGSGTDFTLTISSLQPEDFATYYCQKANSFPYTFGQGTKLEIK
LCDR1:
(SEQ ID NO: 411)
QGISSW
LCDR2:
(SEQ ID NO: 412)
AAS
LCDR3:
(SEQ ID NO: 413)
QKANSFPYT
69323 (REGN16816 anti-hTfR scFv: hGAA)
HCVR (V_{H}) Nucleotide Sequence
(SEQ ID NO: 414)
GAAGTGCAGCTGGTGGAGTCTGGGGGAGGCTTGGTACAGCCTGGCAGGTCCCTGA
GACTCTCCTGTGCAGCCTCTGGATTCACCTTTGATGACTATGCCATGCACTGGGT
CCGGCAAGCTCCAGGGAAGGGCCTGGAGTGGGTCTCAGGTATTAGTTGGAATAGT
GGTTACATAGGCTATGCGGACTCTGTGAAGGGCCGATTCACCATCTCCAGAGACA
ACGCCGAGAACTCCCTACATCTGCAAATGAACAGTCTGAGAGCTGAGGACACGGC
CTTGTATTACTGTGCAAGAGGGGGATCTACTCTGGTTCGGGGAGTTAAGGGAGGC
TACTACGGTATGGACGTCTGGGGCCAAGGGACCACGGTCACCGTCTCCTCA
HCVR (V_{H}) Amino Acid Sequence
(SEQ ID NO: 415)
EVQLVESGGGLVQPGRSLRLSCAASGFTFDDYAMHWVRQAPGKGLEWVSGISWNS
GYIGYADSVKGRFTISRDNAENSLHLQMNSLRAEDTALYYCARGGSTLVRGVKGG
YYGMDVWGQGTTVTVSS
HCDR1:
(SEQ ID NO: 416)
GFTFDDYA
HCDR2:
(SEQ ID NO: 417)
ISWNSGYI
HCDR3:
(SEQ ID NO: 418)
ARGGSTLVRGVKGGYYGMDV
LCVR (V_{L}) Nucleotide Sequence
(SEQ ID NO: 419)
GACATCCAGATGACCCAGTCTCCATCCTCCCTGTCTGCATCTGTAGGAGACAGAG
TCACCATCACTTGCCGGGCAAGTCAGAGCATAAGTAGCTATTTAAATTGGTATCA
GCAGAAACCAGGTAAAGCCCCTAAGGTCCTGATCTATGCTGCATCCAGTTTGCAA
AGTGGGGTCCCATCAAGGTTCAGTGGCAGTGGATCTGGGACAGATTTCACTCTCA
CCATCAGCAGTCTGCAACCTGAAGATTTTGCAACTTACTACTGTCAACAGAGTTA
CAGTATTCCGCTCACTTTCGGCGGAGGGACCAAGGTGGAGATCAAA
LCVR (V_{L}) Amino Acid Sequence
(SEQ ID NO: 420)
DIQMTQSPSSLSASVGDRVTITCRASQSISSYLNWYQQKPGKAPKVLIYAASSLQ
SGVPSRFSGSGSGTDFTLTISSLQPEDFATYYCQQSYSIPLTFGGGTKVEIK
LCDR1:
(SEQ ID NO: 421)
QSISSY
LCDR2:
(SEQ ID NO: 422)
AAS
LCDR3:
(SEQ ID NO: 423)
QQSYSIPLT
69305
HCVR (V_{H}) Nucleotide Sequence
(SEQ ID NO: 424)
CAGGTGCAGCTGGTGGAGTCTGGGGGAGGCGTGGTCCAGCCTGGGAGGTCCCTGA
GACTCTCCTGTGCAGCGTCTGGATTCACCTTCAGTAGCTATGGCATGCACTGGGT
CCGCCAGGCTCCAGGCAAGGGGCTGGAGTGGGTGGCAGTTATATGGTATGATGGA
AGTAATAAATACTATGCAGACTCCGTGAAGGGCCGATTCACCATCTCCAGAGACA
TTTCCAAGAACACGCTGTATCTGCAAATGAACAGCCTGAGAGCCGAGGACACGGC
CGTATATTACTGTGCGGGTCAACTGGATCTCTTCTTTGACTACTGGGGCCAGGGA
ACCCTGGTCACCGTCTCCTCA
HCVR (V_{H}) Amino Acid Sequence
(SEQ ID NO: 425)
QVQLVESGGGVVQPGRSLRLSCAASGFTFSSYGMHWVRQAPGKGLEWVAVIWYDG
SNKYYADSVKGRFTISRDISKNTLYLQMNSLRAEDTAVYYCAGQLDLFFDYWGQG
TLVTVSS
HCDR1:
(SEQ ID NO: 426)
GFTFSSYG
HCDR2:
(SEQ ID NO: 427)
IWYDGSNK
HCDR3:
(SEQ ID NO: 428)
AGQLDLFFDY
LCVR (V_{L}) Nucleotide Sequence
(SEQ ID NO: 429)
GACATCCAGATGACCCAGTCTCCATCCTCCCTGTCTGCATCTGTAGGAGACAGAG
TCACCATCACTTGCCGGGCAAGTCAGAGCATTGACAGGTATTTAAATTGGTATCG
GCAGAAACCAGGGAAAGCCCCTAAGCTCCTGATCTATACTACATCCAGTTTGCAA
AGTGGGGTCCCATCAAGGTTCAGTGGCAGTGGATCTGGGACAGATTTCACTCTCA
CCCTCAGCAGTCTGCAGCCTGAAGATTTTGCAACTTACTACTGTCAGCAGAGTTA
CAGTCCCCCGCTCACTTTCGGCGGAGGGACCAAGGTGGAGATCAAA
LCVR (V_{L}) Amino Acid Sequence
(SEQ ID NO: 430)
DIQMTQSPSSLSASVGDRVTITCRASQSIDRYLNWYRQKPGKAPKLLIYTTSSLQ
SGVPSRFSGSGSGTDFTLTLSSLQPEDFATYYCQQSYSPPLTFGGGTKVEIK
LCDR1:
(SEQ ID NO: 431)
QSIDRY
LCDR2:
(SEQ ID NO: 432)
TTS
LCDR3:
(SEQ ID NO: 433)
QQSYSPPLT
69307 (REGN16817 anti-hTfR scFv: hGAA)
HCVR (V_{H}) Nucleotide Sequence
(SEQ ID NO: 434)
GAGGTGCAGCTGGTGGAGTCTGGGGGAGGCTTGGTCCAGCCTGGGGGGTCCCTGA
GACTCTCCTGTACAGCCTCTGGATTCACCTTTAGTAACTATTGGATGACCTGGGT
CCGCCAGGCTCCAGGGAAGGGGCTGGAGTGGGTGGCCAACATAAAGGAAGATGGA
AGTGAGAAAGAGTATGTGGACTCTGTGAAGGGCCGGTTCACCATCTCCAGAGACA
ACGCCAAGAATTCACTGTATCTGCAAATGAACAGCCTGAGAGGCGAGGACACGGC
TGTATATTACTGTGCGAGAGATGGGGAGCAGCTCGTCGATTACTATTACTACTAC
GTTATGGACGTCTGGGGCCAAGGGACCACGGTCACCGTCTCCTCA
HCVR (V_{H}) Amino Acid Sequence
(SEQ ID NO: 435)
EVQLVESGGGLVQPGGSLRLSCTASGFTFSNYWMTWVRQAPGKGLEWVANIKEDG
SEKEYVDSVKGRFTISRDNAKNSLYLQMNSLRGEDTAVYYCARDGEQLVDYYYYY
VMDVWGQGTTVTVSS
HCDR1:
(SEQ ID NO: 436)
GFTFSNYW
HCDR2:
(SEQ ID NO: 437)
IKEDGSEK
HCDR3:
(SEQ ID NO: 438)
ARDGEQLVDYYYYYVMDV
LCVR (V_{L}) Nucleotide Sequence
(SEQ ID NO: 439)
GACATCCAGATGACCCAGTCTCCATCTTCCGTGTCTGCATCTGTTGGAGACAGAG
TCACCATCACTTGTCGGGCGAGTCAGGGTATTAGCAGCTGGTTAGCCTGGTATCA
GCAGAAACCAGGGAAAGCCCCTAAGCTCCTGATCTATGCTGCATCCAGTTTGCAA
AGTGGGGTCCCATCAAGGTTCAGCGGCAGTGGATCTGGGACAGATTTCACTCTCA
CCATCAGCAGCCTGCAGCCTGAAGATTTTGCAACTTACTATTGTCAAAAGGCTGA
CAGTCTCCCGTACGCTTTTGGCCAGGGGACCAAGCTGGAGATCAAA
LCVR (V_{L}) Amino Acid Sequence
(SEQ ID NO: 440)
DIQMTQSPSSVSASVGDRVTITCRASQGISSWLAWYQQKPGKAPKLLIYAASSLQ
SGVPSRFSGSGSGTDFTLTISSLQPEDFATYYCQKADSLPYAFGQGTKLEIK
LCDR1:
(SEQ ID NO: 441)
QGISSW
LCDR2:
(SEQ ID NO: 442)
AAS
LCDR3:
(SEQ ID NO: 443)
QKADSLPYA
12795B
HCVR (V_{H}) Nucleotide Sequence
(SEQ ID NO: 444)
GAGGTGCAGCTGGTGGAGTCTGGGGGAGGCTTGGTTCAGCCTGGGGGGTCCCTGA
GACTCTCCTGTGCAACCTCTGGATTCACCTTTACCAGCTATGACATGAAGTGGGT
CCGCCAGGCTCCAGGGCTGGGCCTGGAGTGGGTCTCAGCTATTAGTGGTAGTGGT
GGTAACACATACTACGCAGACTCCGTGAAGGGCCGGTTCACCATCTCCAGAGACA
ATTCCAGGAACACGCTGTATCTGCAAATGAACAGCCTGAGAGCCGAGGACACGGC
CGTATATTACTGTACGAGGTCCCATGACTTCGGTGCCTTCGACTACTTTGACTAC
TGGGGCCAGGGAACCCTGGTCACCGTCTCCTCA
HCVR (V_{H}) Amino Acid Sequence
(SEQ ID NO: 445)
EVQLVESGGGLVQPGGSLRLSCATSGFTFTSYDMKWVRQAPGLGLEWVSAISGSG
GNTYYADSVKGRFTISRDNSRNTLYLQMNSLRAEDTAVYYCTRSHDFGAFDYFDY
WGQGTLVTVSS
HCDR1:
(SEQ ID NO: 446)
GFTFTSYD
HCDR2:
(SEQ ID NO: 447)
ISGSGGNT
HCDR3:
(SEQ ID NO: 448)
TRSHDFGAFDYFDY
LCVR (V_{L}) Nucleotide Sequence
(SEQ ID NO: 449)
GACATCCAGATGACCCAGTCTCCATCCTCCCTGTCTGCATCTGTGGGAGACAGAG
TCACCATCACTTGCCGGGCAAGTCAGGGCATTAGAGATCATTTTGGCTGGTATCA
GCAGAAACCAGGGAAAGCCCCTAAGCGCCTGATCTATGCTGCATCCAGTTTGCAC
AGTGGGGTCCCATCAAGGTTCAGCGGCAGTGGATCTGGGACAGAATTCACTCTCA
CAATCAGCAGCTTGCAGCCTGAAGATTTTGCAACCTATTACTGTCTACAGTATGA
TACTTACCCGCTCACTTTCGGCGGAGGGACCAAGGTGGAGATCAAA
LCVR (V_{L}) Amino Acid Sequence
(SEQ ID NO: 450)
DIQMTQSPSSLSASVGDRVTITCRASQGIRDHFGWYQQKPGKAPKRLIYAASSLH
SGVPSRFSGSGSGTEFTLTISSLQPEDFATYYCLQYDTYPLTFGGGTKVEIK
LCDR1:
(SEQ ID NO: 451)
QGIRDH
LCDR2:
(SEQ ID NO: 452)
AAS
LCDR3:
(SEQ ID NO: 453)
LQYDTYPLT
12798B (REGN17078 Fab; REGN17072 scFv;
REGN16818 anti-hTfR scFv: hGAA)
HCVR (V_{H}) Nucleotide Sequence
(SEQ ID NO: 454)
GAAGTGCAGCTGGTGGAGTCTGGGGGAGACTTGGTACAGCCTGGCAGGTCCCTGA
GACTCTCCTGTGCAGCCTCTGGATTCACCTTTGATGATTATGCCATGCACTGGGT
CCGGCAAGCTCCAGGGAAGGGCCTGGAGTGGGTCTCAGGTATTAGTTGGAATAGT
GCTACCAGAGTCTATGCGGACTCTGTGAAGGGCCGATTCACCATCTCCAGAGACA
ACGCCAAGAATTTCCTGTATCTGCAAATGAACAGTCTGAGATCTGAGGACACGGC
CTTGTATCACTGTGCAAAAGATATGGATATCTCGCTAGGGTACTACGGTTTGGAC
GTCTGGGGCCAAGGGACCACGGTCACCGTCTCCTCA
HCVR (V_{H}) Amino Acid Sequence
(SEQ ID NO: 455)
EVQLVESGGDLVQPGRSLRLSCAASGFTFDDYAMHWVRQAPGKGLEWVSGISWNS
ATRVYADSVKGRFTISRDNAKNFLYLQMNSLRSEDTALYHCAKDMDISLGYYGLD
VWGQGTTVTVSS
HCDR1:
(SEQ ID NO: 456)
GFTFDDYA
HCDR2:
(SEQ ID NO: 457)
ISWNSATR
HCDR3:
(SEQ ID NO: 458)
AKDMDISLGYYGLDV
LCVR (V_{L}) Nucleotide Sequence
(SEQ ID NO: 459)
GAAATAGTGATGACGCAGTCTCCAGCCACCCTGTCTGTGTCTCCAGGGGAAAGAG
CCACCCTCTCCTGCAGGGCCAGTCAGACTGTTAGCAGCAACTTAGCCTGGTATCA
GCAGAAACCTGGCCAGGCTCCCAGGCTCCTCATCTATGGTTCATCCTCCAGGGCC
ACTGGTATCCCAGCCAGGTTCAGTGGCAGTGGGTCTGGGACAGAGTTCACTCTCA
CCATCAGCAGCCTGCAGTCTGAAGATTTTGCAGTTTATTACTGTCAGCAGTATAA
TAACTGGCCTCCCTACACTTTTGGCCAGGGGACCAAGCTGGAGATCAAA
LCVR (V_{L}) Amino Acid Sequence
(SEQ ID NO: 460)
EIVMTQSPATLSVSPGERATLSCRASQTVSSNLAWYQQKPGQAPRLLIYGSSSRA
TGIPARFSGSGSGTEFTLTISSLQSEDFAVYYCQQYNNWPPYTFGQGTKLEIK
LCDR1:
(SEQ ID NO: 461)
QTVSSN
LCDR2:
(SEQ ID NO: 462)
GSS
LCDR3:
(SEQ ID NO: 463)
QQYNNWPPYT
12799B (REGN17079 Fab; REGN17073 scFv;
REGN16819 anti-hTfR scFv: hGAA)
HCVR (V_{H}) Nucleotide Sequence
(SEQ ID NO: 464)
CAGATCACCTTGAAGGAGTCTGGTCCTACGCTGGTGAAACCCACACAGACCCTCA
CGCTGACCTGCACCTTCTCTGGGTTCTCACTCAGCACTAGTGGAGTGGGTGTGGT
CTGGATCCGTCAGCCCCCCGGAAAGGCCCTGGAGTGGCTTGCACTCATTTATTGG
AATGATCATAAGCGGTACAGCCCATCTCTGGGGAGCAGGCTCACCATCACCAAGG
ACACCTCCAAAAACCAGGTGGTCCTTACAATGACCAACATGGACCCTGTGGACAC
AGCCACATATTACTGTGCACACTACAGTGGGAGCTATTCCTACTACTACTATGGT
TTGGACGTCTGGGGCCAAGGGACCACGGTCACCGTCTCCTCA
HCVR (V_{H}) Amino Acid Sequence
(SEQ ID NO: 465)
QITLKESGPTLVKPTQTLTLTCTFSGFSLSTSGVGVVWIRQPPGKALEWLALIYW
NDHKRYSPSLGSRLTITKDTSKNQVVLTMTNMDPVDTATYYCAHYSGSYSYYYYG
LDVWGQGTTVTVSS
HCDR1:
(SEQ ID NO: 466)
GFSLSTSGVG
HCDR2:
(SEQ ID NO: 467)
IYWNDHK
HCDR3:
(SEQ ID NO: 468)
AHYSGSYSYYYYGLDV
LCVR (V_{L}) Nucleotide Sequence
(SEQ ID NO: 469)
GACATCCAGATGACCCAGTCTCCATCTTCCGTGTCTGCATCTGTAGGAGACAGAG
TCACCATCACTTGTCGGGCGAGTCAGGGTATTGCCAGCTGGTTAGCCTGGTATCA
GCAGAAACCAGGGAAAGCCCCTGAGCTCCTGATCTATGCTGCATCCAGTTTGCAA
GGTGGGGTCCCATCAAGGTTCAGCGGCAGTGGATCTGGGACAGATTTCACTCTCA
CCATCAGCAGCCTGCAGCCTGAAGATTTTGCAATTTACTATTGTCAACAGGCTAA
CTATTTCCCGTGGACGTTCGGCCAAGGGACCAAGGTGGAAATCAAA
LCVR (V_{L}) Amino Acid Sequence
(SEQ ID NO: 470)
DIQMTQSPSSVSASVGDRVTITCRASQGIASWLAWYQQKPGKAPELLIYAASSLQ
GGVPSRFSGSGSGTDFTLTISSLQPEDFAIYYCQQANYFPWTFGQGTKVEIK
LCDR1:
(SEQ ID NO: 471)
QGIASW
LCDR2:
(SEQ ID NO: 472)
AAS
LCDR3:
(SEQ ID NO: 473)
QQANYFPWT
12801B
HCVR (V_{H}) Nucleotide Sequence
(SEQ ID NO: 474)
GAGGTGCAGCTGTTGGAGTCTGGGGGAGCCTTGGTACAGCCTGGGGGGTCCCTGA
GACTCTCCTGTGCAGCCTCTGGATTCACCTTTACCTCCTATGCCATGCACTGGGT
CCGCCAGGCTCCAGGGAAGGGTCTGGAGTGGGTCTCATCTATTAGAGGTAGTGGT
GGTGGCACATACTCCGCAGACTCCGTGAAGGGCCGGTTCACCATCTCCAGAGACA
ATTCCAGGGACACTCTATATCTGCAAATGAACAGTGTGAGAGCCGAGGACACGGC
CGTTTATTACTGTGCGAGGTCCCATGACTACGGTGCCTTCGACTTCTTTGACTAC
TGGGGCCAGGGAACCCTGGTCACCGTCTCCTCA
HCVR (V_{H}) Amino Acid Sequence
(SEQ ID NO: 475)
EVQLLESGGALVQPGGSLRLSCAASGFTFTSYAMHWVRQAPGKGLEWVSSIRGSG
GGTYSADSVKGRFTISRDNSRDTLYLQMNSVRAEDTAVYYCARSHDYGAFDFFDY
WGQGTLVTVSS
HCDR1:
(SEQ ID NO: 476)
GFTFTSYA
HCDR2:
(SEQ ID NO: 477)
IRGSGGGT
HCDR3:
(SEQ ID NO: 478)
ARSHDYGAFDFFDY
LCVR (V_{L}) Nucleotide Sequence
(SEQ ID NO: 479)
GACATCCAGATGACCCAGTCTCCATCCTCCCTGTCTGCATCTGTAGGAGACAGAG
TCACCATCACTTGCCGGGCAAGTCAGGGCATTAGAACTGATTTAGGCTGGTATCA
GCAGAAACCAGGGAAAGCCCCTAAGCGCCTGATCTATGCTGCATCCAGTTTGCAA
AGTGGGGTCCCATCAAGGTTCAGCGGCAGTGGATCTGGGACAGAATTCACTCTCA
CAATCAGCAGCCTGCGGCCTGAAGATTTTGCAACTTTTTACTGTCTACAGTATAA
TAGTTACCCGCTCACTTTCGGCGGAGGGACCAAGGTGGAGATCAAA
LCVR (V_{L}) Amino Acid Sequence
(SEQ ID NO: 480)
DIQMTQSPSSLSASVGDRVTITCRASQGIRTDLGWYQQKPGKAPKRLIYAASSLQ
SGVPSRFSGSGSGTEFTLTISSLRPEDFATFYCLQYNSYPLTFGGGTKVEIK
LCDR1:
(SEQ ID NO: 481)
QGIRTD
LCDR2:
(SEQ ID NO: 482)
AAS
LCDR3:
(SEQ ID NO: 483)
LQYNSYPLT
12802B (REGN16820 anti-hTfR scFv: hGAA)
HCVR (V_{H}) Nucleotide Sequence
(SEQ ID NO: 484)
CAGGTGCAGCTGGTGGAGTCTGGGGGAGGCTTGGTCAAGCCTGGAGGGTCCCTGA
GACTCTCCTGTGCAGCCTCTGGATTCACCTTCAGTGACTACTTCATGAGCTGGAT
CCGCCAGGCTCCAGGGAAGGGGCTGGAGTGGGTTTCATACATTAGTAGTACTGGT
AGTACCATAAATTATGCAGACTCTGTGAAGGGCCGATTCACCATCTCCAGGGACA
ATGTCAAGAATTCACTGTATCTGCAAATGACCAGCCTGAGAGTCGAGGACACGGC
CGTGTATTACTGTACGAGAGATAACTGGAACTATGAATACTGGGGCCAGGGAACC
CTGGTCACCGTCTCCTCA
HCVR (V_{H}) Amino Acid Sequence
(SEQ ID NO: 485)
QVQLVESGGGLVKPGGSLRLSCAASGFTFSDYFMSWIRQAPGKGLEWVSYISSTG
STINYADSVKGRFTISRDNVKNSLYLQMTSLRVEDTAVYYCTRDNWNYEYWGQGT
LVTVSS
HCDR1:
(SEQ ID NO: 486)
GFTFSDYF
HCDR2:
(SEQ ID NO: 487)
ISSTGSTI
HCDR3:
(SEQ ID NO: 488)
TRDNWNYEY
LCVR (V_{L}) Nucleotide Sequence
(SEQ ID NO: 489)
GAAATAGTGATGACGCAGTCTCCAGCCACCCTGTCTGTGTCTCCAGGGGAAAGAG
CCACCCTCTCCTGCAGGGCCAGTCAGAGTGTTAGCATCAACTTAGCCTGGTACCA
GCAGAAACCTGGCCAGGCTCCCAGGCTCCTCATCTTTGTTGCATCCACCAGGGCC
ACTGGTATCCCAGCCAGGTTCAGTGGCAGTGGGTCTGGGACAGAGTTCACTCTCA
CCATCAGCAGCCTGCAGTCTGAAGATTTTGCAACTTATTACTGTCAGCAGTATGA
TATCTGGCCGTACACTTTTGGCCAGGGGACCAAGCTGGAGATCAAA
LCVR (V_{L}) Amino Acid Sequence
(SEQ ID NO: 490)
EIVMTQSPATLSVSPGERATLSCRASQSVSINLAWYQQKPGQAPRLLIFVASTRA
TGIPARFSGSGSGTEFTLTISSLQSEDFATYYCQQYDIWPYTFGQGTKLEIK
LCDR1:
(SEQ ID NO: 491)
QSVSIN
LCDR2:
(SEQ ID NO: 492)
VAS
LCDR3:
(SEQ ID NO: 493)
QQYDIWPYT
12808B
HCVR (V_{H}) Nucleotide Sequence
(SEQ ID NO: 494)
CAGCTGCAGCTGCAGGAGTCGGGCCCAGGACTGGTGAAGCCTTCGGAGACCCTGT
CCCTCACCTGCACTGTGTCTGGTGAATCCATCAGCAGTAATACTTACTACTGGGG
CTGGATCCGCCAGCCCCCAGGGAAGGGGCTGGAATGGATTGGGAGTATCGATTAT
AGTGGGACCACCAATTATAACCCGTCCCTCAAGAGTCGAGTCACCATATCCGTAG
ACACGTCCAGGAATCACTTCTCCCTGAGGCTGAGGTCTGTGACCGCCGCAGACAC
GGCTGTGTATTACTGTGCGAGAGAGTGGGGAAACTACGGCTACTATTACGGTATG
GACGTTTGGGGCCAAGGGACCACGGTCACCGTCTCCTCA
HCVR (V_{H}) Amino Acid Sequence
(SEQ ID NO: 495)
QLQLQESGPGLVKPSETLSLTCTVSGESISSNTYYWGWIRQPPGKGLEWIGSIDY
SGTTNYNPSLKSRVTISVDTSRNHFSLRLRSVTAADTAVYYCAREWGNYGYYYGM
DVWGQGTTVTVSS
HCDR1:
(SEQ ID NO: 496)
GESISSNTYY
HCDR2:
(SEQ ID NO: 497)
IDYSGTT
HCDR3:
(SEQ ID NO: 498)
AREWGNYGYYYGMDV
LCVR (V_{L}) Nucleotide Sequence
(SEQ ID NO: 499)
GACATCCAGATGACCCAGTCTCCATCCTCCCTGTCTGCATCTGTAGGAGACAGAG
TCACCATCAATTGCCGGGCAAGTCAGGGCATTAGAAATGATTTAGGCTGGTATCA
GCAGAAACCAGGGAAAGCCCCTAAGCGCCTGATCTATGCTGCATCCAGTTTGCAA
AGTGGGGTCCCATTAAGGTTCAGTGGCAGTGGATCTGGGACAGAATTCACTCTCA
CAATCAACAACCTGCAGCCTGAAGATTTTGCAACTTATTACTGTCTATCGCATAA
TAGTTACCCGTGGACGTTCGGCCAAGGGACCAAGGTGGAAATCAAA
LCVR (V_{L}) Amino Acid Sequence
(SEQ ID NO: 500)
DIQMTQSPSSLSASVGDRVTINCRASQGIRNDLGWYQQKPGKAPKRLIYAASSLQ
SGVPLRFSGSGSGTEFTLTINNLQPEDFATYYCLSHNSYPWTFGQGTKVEIK
LCDR1:
(SEQ ID NO: 501)
QGIRND
LCDR2:
(SEQ ID NO: 502)
AAS
LCDR3:
(SEQ ID NO: 503)
LSHNSYPWT
12812B (REGN16821 anti-hTfR scFv: hGAA)
HCVR (V_{H}) Nucleotide Sequence
(SEQ ID NO: 504)
CAGGTGCAGCTGGTGCAGTCTGGGGCTGAGGTGAAGAAGCCTGGGTCCTCGGTGA
GGGTCTCCTGCAAGGCTTCTAGAGGCACCTTCAGCAGCTATGCTATCAGCTGGGT
GCGACAGGCCCCTGGACAAGGCCTTGAGTGGATGGGAGGGATCATCCCCATCTTT
GGTACAGCAAACTACGCACAGAAGTTCCTGGCCAGAGTCACGATTACCGCGGACG
AATCCACGAGCACAGCCTACATGGAGCTGAGCAGCCTGAGATCTGAGGACACGGC
CGTGTATTACTGTGCGAGAGAGAAGGGGTGGAACTACTTTGACTACTGGGGCCAG
GGAACCCTGGTCACCGTCTCCTCA
HCVR (V_{H}) Amino Acid Sequence
(SEQ ID NO: 505)
QVQLVQSGAEVKKPGSSVRVSCKASRGTFSSYAISWVRQAPGQGLEWMGGIIPIF
GTANYAQKFLARVTITADESTSTAYMELSSLRSEDTAVYYCAREKGWNYFDYWGQ
GTLVTVSS
HCDR1:
(SEQ ID NO: 506)
RGTFSSYA
HCDR2:
(SEQ ID NO: 507)
IIPIFGTA
HCDR3:
(SEQ ID NO: 508)
AREKGWNYFDY
LCVR (V_{L}) Nucleotide Sequence
(SEQ ID NO: 509)
GACATCCAGATGACCCAGTCTCCACCTTCCGTGTCTGCATCTGTAGGAGACAGAG
TCACCATCACTTGTCGGGCGAGTCAGGGTATTAGCAGCTGGTTAGCCTGGTATCA
GCAGAAACCAGGGAAAGCCCCTAAACTCCTGATCTATGCTGCATCCAGTTTGCAA
AGTGGGGTCCCATCAAGGTTCAGCGGCAGTGGATCTGGGACAGATTTCACTCTCA
CCATCAGCAGCCTGCAGCCTGAAGATTTTGCAACTTACTATTGTCAACAGGCTAA
CAGTTTCCCTCGGACGTTCGGCCAAGGGACCAAGGTGGAAATCAAA
LCVR (V_{L}) Amino Acid Sequence
(SEQ ID NO: 510)
DIQMTQSPPSVSASVGDRVTITCRASQGISSWLAWYQQKPGKAPKLLIYAASSLQ
SGVPSRFSGSGSGTDFTLTISSLQPEDFATYYCQQANSFPRTFGQGTKVEIK
LCDR1:
(SEQ ID NO: 511)
QGISSW
LCDR2:
(SEQ ID NO: 512)
AAS
LCDR3:
(SEQ ID NO: 513)
QQANSFPRT
12816B
HCVR (V_{H}) Nucleotide Sequence
(SEQ ID NO: 514)
CAGGTGCAGCTGGTGGAGTCTGGGGGAGGCTTGGTCAAGCCTGGAGGGTCCCTGA
GACTCTCCTGTGCAGCCTCTGGATTCACCTTCAGTGACTACTACATGAACTGGAT
CCGCCAGGCTCCAGGGAAGGGGCTGGAGTGGGTTTCATACATTAGTAGTAGTGGG
ACTACCATATACTACGCAGACTCTGTGAAGGGCCGATTCACCATCTCCAGGGACA
ACGCCAAGAAATCACTGTATCTGGAGATGAACAGCCTCAGAGCCGAGGACACGGC
CGTGTACTACTGTGCGAGAGAGGGGTACGGTAATGACTACTATTACTACGGTATA
GACGTCTGGGGCCAAGGGACCACGGTCACCGTCTCCTCA
HCVR (V_{H}) Amino Acid Sequence
(SEQ ID NO: 515)
QVQLVESGGGLVKPGGSLRLSCAASGFTFSDYYMNWIRQAPGKGLEWVSYISSSG
TTIYYADSVKGRFTISRDNAKKSLYLEMNSLRAEDTAVYYCAREGYGNDYYYYGI
DVWGQGTTVTVSS
HCDR1:
(SEQ ID NO: 516)
GFTFSDYY
HCDR2:
(SEQ ID NO: 517)
ISSSGTTI
HCDR3:
(SEQ ID NO: 518)
AREGYGNDYYYYGIDV
LCVR (V_{L}) Nucleotide Sequence
(SEQ ID NO: 519)
GATATTGTGATGACTCAGTCTCCACTCTCCCTGCCCGTCACCCCTGGAGAGCCGG
CCTCCATCTCCTGCAGGTCTAGTCAGAGCCTCCTGCATGGTAATGGATACAACTA
TTTGACTTGGTACCTGCAGAAGCCAGGGCAGTCTCCACAGCTCCTGATCTATTTG
GGTTCTAATCGGGCCTCCGGGGTCCCTGACAGGTTCAGTGGCAGTGGATCAGGCA
CAGATTTTACACTGAAAATAAGCAGAGTGGAGGCTGAGGATGTTGGGGTTTATTA
CTGCATGCAAGCTCTACAAACTCCGTACACTTTTGGCCAGGGGACCAAGCTGGAG
ATCAAA
LCVR (V_{L}) Amino Acid Sequence
(SEQ ID NO: 520)
DIVMTQSPLSLPVTPGEPASISCRSSQSLLHGNGYNYLTWYLQKPGQSPQLLIYL
GSNRASGVPDRFSGSGSGTDFTLKISRVEAEDVGVYYCMQALQTPYTFGQGTKLE
IK
LCDR1:
(SEQ ID NO: 521)
QSLLHGNGYNY
LCDR2:
(SEQ ID NO: 522)
LGS
LCDR3:
(SEQ ID NO: 523)
MQALQTPYT
12833B
HCVR (V_{H}) Nucleotide Sequence
(SEQ ID NO: 524)
CAGGTGCAGCTGGTGGAGTCTGGGGGAGGCGTGGTCCAGCCTGGGAGGTCCCTGA
GACTCTCCTGTGCAGCCTCTGGATTCACCTTCAGTAGCTTTGGCATGCACTGGGT
CCGCCAGGCTCCAGGCAAGGGGCTGGAGTGGGTGATATTTATATCATATGATGGA
AGTGATAAATACTATGCAGACTCCGTGAAGGGCCGATTCGCCATCTCCAGAGACA
GTTCCAAGAACACGCTATATCTGCAAATGAACAGCCTGAGAGCTGAGGACACGGC
TGTGTATTACTGTGCGAAAGAAAACGGTATTTTGACTGATTCCTACGGTATGGAC
GTCTGGGGCCAAGGGACCACGGTCACCGTCTCCTCA
HCVR (V_{H}) Amino Acid Sequence
(SEQ ID NO: 525)
QVQLVESGGGVVQPGRSLRLSCAASGFTFSSFGMHWVRQAPGKGLEWVIFISYDG
SDKYYADSVKGRFAISRDSSKNTLYLQMNSLRAEDTAVYYCAKENGILTDSYGMD
VWGQGTTVTVSS
HCDR1:
(SEQ ID NO: 526)
GFTFSSFG
HCDR2:
(SEQ ID NO: 527)
ISYDGSDK
HCDR3:
(SEQ ID NO: 528)
AKENGILTDSYGMDV
LCVR (V_{L}) Nucleotide Sequence
(SEQ ID NO: 529)
GACATCCAGATGACCCAGTCTCCATCCTCCCTGTCTGCATCTGTAGGAGACAGAG
TCACCATCACTTGCCGGGCAAGTCAGAGCATTAGCAGCTATTTAAATTGGTATCA
GCAGAAACCAGGGAAAGCCCCTAAGCTCCTGATCTATGCTGCATCCAGTTTGCAA
AGTGGGGTCCCGTCAAGGTTCAGTGGCAGTGGATCTGGGACAGATTTCACTCTCA
CCATCAGCAGTCTGCAACCTGAAGATTTTGCAACTTACTACTGTCAACAGAGTTA
CAGTACCCCTCCGATCACCTTCGGCCAAGGGACACGACTGGAGATTAAA
LCVR (V_{L}) Amino Acid Sequence
(SEQ ID NO: 530)
DIQMTQSPSSLSASVGDRVTITCRASQSISSYLNWYQQKPGKAPKLLIYAASSLQ
SGVPSRFSGSGSGTDFTLTISSLQPEDFATYYCQQSYSTPPITFGQGTRLEIK
LCDR1:
(SEQ ID NO: 531)
QSISSY
LCDR2:
(SEQ ID NO: 532)
AAS
LCDR3:
(SEQ ID NO: 533)
QQSYSTPPIT
12834B
HCVR (V_{H}) Nucleotide Sequence
(SEQ ID NO: 534)
CAGGTTCAGCTGGTGCAGTCTGGAGCTGAGGTGAAGAAGCCTGGGGCCTCTGTGA
AGGTCTCCTGCAAGGCTTCTGGTTACACCTTTACCAGCTATGGTATCAGCTGGGT
GCGACAGGCCCCTGGACAAGGGCTTGAGTGGATGGGATGGATCAGTGTTTACCAT
GGTAACACAAACTATGCACAGAAGTTCCAGGGCAGAGTCACCATGACCACAGACA
CATCCACGAGCACAGCCTACATGGAGCTGAGGAGCCTGAGATCTGACGACACGGC
CGTGTATTACTGTGCGAGAGAGGGGTATTACGATTTTTGGAGTGGTTATTACCCT
TTTGACTACTGGGGCCAGGGAACCCTGGTCACCGTCTCCTCA
HCVR (V_{H}) Amino Acid Sequence
(SEQ ID NO: 535)
QVQLVQSGAEVKKPGASVKVSCKASGYTFTSYGISWVRQAPGQGLEWMGWISVYH
GNTNYAQKFQGRVTMTTDTSTSTAYMELRSLRSDDTAVYYCAREGYYDFWSGYYP
FDYWGQGTLVTVSS
HCDR1:
(SEQ ID NO: 536)
GYTFTSYG
HCDR2:
(SEQ ID NO: 537)
ISVYHGNT
HCDR3:
(SEQ ID NO: 538)
AREGYYDFWSGYYPFDY
LCVR (V_{L}) Nucleotide Sequence
(SEQ ID NO: 539)
GACATCCAGATGACCCAGTCTCCATCCTCCCTGTCTGCATCTGTAGGAGACAGAG
TCACCATCACTTGCCGGGCAAGTCAGAGCATTAGCAGCTATTTAAATTGGTATCA
GCAGAAACCAGGGAAAGCCCCTAAGCTCCTGATCTATGCTGCATCCAGTTTGCAA
AGTGGGGTCCCGTCAAGGTTCAGTGGCAGTGGATCTGGGACAGATTTCACTCTCA
CCATCAGCAGTCTGCAACCTGAAGATTTTGCAACTTACTACTGTCAACAGAGTTA
CAGTACCCCTCCGATCACCTTCGGCCAAGGGACACGACTGGAGATTAAA
LCVR (V_{L}) Amino Acid Sequence
(SEQ ID NO: 540)
DIQMTQSPSSLSASVGDRVTITCRASQSISSYLNWYQQKPGKAPKLLIYAASSLQ
SGVPSRFSGSGSGTDFTLTISSLQPEDFATYYCQQSYSTPPITFGQGTRLEIK
LCDR1:
(SEQ ID NO: 541)
QSISSY
LCDR2:
(SEQ ID NO: 542)
AAS
LCDR3:
(SEQ ID NO: 543)
QQSYSTPPIT
12835B
HCVR (V_{H}) Nucleotide Sequence
(SEQ ID NO: 544)
GAGGTGCAGCTGGTGGAGTCTGGGGGAGGCTTGATACAACCTGGAGGGTCCCTGA
GACTCTCCTGTGAAGCCTCTGGATTCACCTTCAGAAATTATGAAATGAATTGGGT
CCGCCAGGCTCCAGGGAAGGGGCTGGAGTGGGTTTCATATATTAGTAGTAGTGGT
AATATGAAAGACTACGCAGAGTCTGTGAAGGGCCGATTCACCATCTCCAGAGACA
ATGTCAAGAATTCACTGCAGCTGCAAATGAACAGCCTGAGAGTCGAGGACACGGC
TGTTTATTACTGTGCGAGAGACGAGTTTCCTTACGGAATGGACGTCTGGGGCCAA
GGGACCACGGTCACCGTCTCCTCA
HCVR (V_{H}) Amino Acid Sequence
(SEQ ID NO: 545)
EVQLVESGGGLIQPGGSLRLSCEASGFTFRNYEMNWVRQAPGKGLEWVSYISSSG
NMKDYAESVKGRFTISRDNVKNSLQLQMNSLRVEDTAVYYCARDEFPYGMDVWGQ
GTTVTVSS
HCDR1:
(SEQ ID NO: 546)
GFTFRNYE
HCDR2:
(SEQ ID NO: 547)
ISSSGNMK
HCDR3:
(SEQ ID NO: 548)
ARDEFPYGMDV
LCVR (V_{L}) Nucleotide Sequence
(SEQ ID NO: 549)
GACATCCAGATGACCCAGTCTCCATCCTCCCTGTCTGCATCTGTAGGAGACAGAG
TCACCATCACTTGCCGGGCAAGTCAGAGCATTAGCAGCTATTTAAATTGGTATCA
GCAGAAACCAGGGAAAGCCCCTAAGCTCCTGATCTATGCTGCATCCAGTTTGCAA
AGTGGGGTCCCGTCAAGGTTCAGTGGCAGTGGATCTGGGACAGATTTCACTCTCA
CCATCAGCAGTCTGCAACCTGAAGATTTTGCAACTTACTACTGTCAACAGAGTTA
CAGTACCCCTCCGATCACCTTCGGCCAAGGGACACGACTGGAGATTAAA
LCVR (V_{L}) Amino Acid Sequence
(SEQ ID NO: 550)
DIQMTQSPSSLSASVGDRVTITCRASQSISSYLNWYQQKPGKAPKLLIYAASSLQ
SGVPSRFSGSGSGTDFTLTISSLQPEDFATYYCQQSYSTPPITFGQGTRLEIK
LCDR1:
(SEQ ID NO: 551)
QSISSY
LCDR2:
(SEQ ID NO: 552)
AAS
LCDR3:
(SEQ ID NO: 553)
QQSYSTPPIT
12847B (REGN17083 anti-hTfR Fab; REGN17077 anti-hTfR scFv;
REGN16826 anti-hTfR scFv: hGAA)
HCVR (V_{H}) Nucleotide Sequence
(SEQ ID NO: 554)
GAAGTGCAGCTGGTGGAGTCTGGGGGAGGCTTGGTTCAGCCTGGCAGGTCCCTGA
GACTCTCCTGTGCAGCCTCTGGATTCACCTTTGATGATTATGCCATGAACTGGGT
CCGGCAAGCTCCAGGGAAGGGCCTGGAGTGGGTCTCAGGTATTAGTTGGAGTAGT
GGTAGCATGGACTATGCGGACTCTGTGAAGGGCCGATTCACCATCTCCAGAGACA
ACGCCAAAAACTCCCTGTATCTGCAAATGAACAGTCTGAGAACTGAGGACACGGC
CTTATATTACTGTGCAAAAGCTAGGGAAGTTGGAGACTACTACGGTATGGACGTC
TGGGGCCAAGGGACCACGGTCACCGTCTCCTCA
HCVR (V_{H}) Amino Acid Sequence
(SEQ ID NO: 555)
EVQLVESGGGLVQPGRSLRLSCAASGFTFDDYAMNWVRQAPGKGLEWVSGISWSS
GSMDYADSVKGRFTISRDNAKNSLYLQMNSLRTEDTALYYCAKAREVGDYYGMDV
WGQGTTVTVSS
HCDR1:
(SEQ ID NO: 556)
GFTFDDYA
HCDR2:
ISWSSGSM
(SEQ ID NO: 557)
HCDR3:
(SEQ ID NO: 558)
AKAREVGDYYGMDV
LCVR (V_{L}) Nucleotide Sequence
(SEQ ID NO: 559)
GACATCCAGATGACCCAGTCTCCATCCTCCCTGTCTGCATCTGTAGGAGACAGAG
TCACCATCACTTGCCGGGCAAGTCAGAGCATTAGCAGCTATTTAAATTGGTATCA
GCAGAAACCAGGGAAAGCCCCTAAGCTCCTGATCTATGCTGCATCCAGTTTGCAA
AGTGGGGTCCCGTCAAGGTTCAGTGGCAGTGGATCTGGGACAGATTTCACTCTCA
CCATCAGCAGTCTGCAACCTGAAGATTTTGCAACTTACTACTGTCAACAGAGTTA
CAGTACCCCTCCGATCACCTTCGGCCAAGGGACACGACTGGAGATTAAA
LCVR (V_{L}) Amino Acid Sequence
(SEQ ID NO: 560)
DIQMTQSPSSLSASVGDRVTITCRASQSISSYLNWYQQKPGKAPKLLIYAASSLQ
SGVPSRFSGSGSGTDFTLTISSLQPEDFATYYCQQSYSTPPITFGQGTRLEIK
LCDR1:
(SEQ ID NO: 561)
QSISSY
LCDR2:
(SEQ ID NO: 562)
AAS
LCDR3:
(SEQ ID NO: 563)
QQSYSTPPIT
12848B (REGN16827 anti-hTfR scFv: hGAA)
HCVR (V_{H}) Nucleotide Sequence
(SEQ ID NO: 564)
GAAGTGCAGCTGGTGGAGTCTGGGGGAGGCTTGGTACAGCCTGGCAGGTCCCTGA
CACTCTCCTGTGCAGCCTCTGGATTCACCTTTGATAATTTTGGCATGCACTGGGT
CCGGCAAGGTCCAGGGAAGGGCCTGGAATGGGTCTCAGGTCTTACTTGGAATAGT
GGTGTCATAGGCTATGCGGACTCTGTGAAGGGCCGATTCACCATCTCCAGAGACA
ACGCCAAGAACTCCCTGTATCTGCAAATGAACAGTCTGAGACCTGAGGACACGGC
CTTATATTACTGTGCAAAAGATATACGGAATTACGGCCCCTTTGACTACTGGGGC
CAGGGAACCCTGGTCACCGTCTCCTCA
HCVR (V_{H}) Amino Acid Sequence
(SEQ ID NO: 565)
EVQLVESGGGLVQPGRSLTLSCAASGFTFDNFGMHWVRQGPGKGLEWVSGLTWNS
GVIGYADSVKGRFTISRDNAKNSLYLQMNSLRPEDTALYYCAKDIRNYGPFDYWG
QGTLVTVSS
HCDR1:
(SEQ ID NO: 566)
GFTFDNFG
HCDR2:
(SEQ ID NO: 567)
LTWNSGVI
HCDR3:
(SEQ ID NO: 568)
AKDIRNYGPFDY
LCVR (V_{L}) Nucleotide Sequence
(SEQ ID NO: 569)
GAAATTGTGTTGACGCAGTCTCCAGGCACCCTGTCTTTGTCTCCAGGGGAAAGAG
CCACCCTCTCCTGCAGGGCCAGTCAGAGTGTTAGCAGCAGCTACTTAGCCTGGTA
CCAGCAGAAACCTGGCCAGGCTCCCAGGCTCCTCATCTATGGTGCATCCAGCAGG
GCCACTGGCATCCCAGACAGGTTCAGTGGCAGTGGGTCTGGGACAGACTTCACTC
TCACCATCAGCAGACTGGAGCCTGAAGATTTTGCAGTGTATTACTGTCAGCAGTA
TGGTAGCTCACCTTGGACGTTCGGCCAAGGGACCAAGGTGGAAATCAAA
LCVR (V_{L}) Amino Acid Sequence
(SEQ ID NO: 570)
EIVLTQSPGTLSLSPGERATLSCRASQSVSSSYLAWYQQKPGQAPRLLIYGASSR
ATGIPDRFSGSGSGTDFTLTISRLEPEDFAVYYCQQYGSSPWTFGQGTKVEIK
LCDR1:
(SEQ ID NO: 571)
QSVSSSY
LCDR2:
(SEQ ID NO: 572)
GAS
LCDR3:
(SEQ ID NO: 573)
QQYGSSPWT
12843B (REGN17075 anti-hTfR scFv;
REGN16824 anti-hTfR scFv: hGAA;
REGN17081 anti-hTfR Fab)
HCVR (V_{H}) Nucleotide Sequence
(SEQ ID NO: 574)
GAGGTGCAGCTGGTGGAGTCTGGGGGAGGCTTAGTACAGCCTGGAGGGTCCCTAA
GACTCTCCTGTGCAGCCTCTGGATTCACCTTCAATATTTTTGAAATGAACTGGGT
CCGCCAGGCTCCAGGGAAGGGGCTGGAGTGGATTTCCTACATTAGTAGTCGTGGA
ACTACCACATACTACGCAGACTCTGTGAGGGGCCGATTCACCATCTCCAGAGACA
ACGCCAAGAACTCACTGTATCTGCAAATGAACAGCCTGAGAGCCGAGGACACGGC
TGTTTATTACTGTGCGAGAGATTATGAAGCAACAATCCCTTTTGACTTCTGGGGC
CAGGGAACCCTGGTCACCGTCTCCTCA
HCVR (V_{H}) Amino Acid Sequence
(SEQ ID NO: 575)
EVQLVESGGGLVQPGGSLRLSCAASGFTFNIFEMNWVRQAPGKGLEWISYISSRG
TTTYYADSVRGRFTISRDNAKNSLYLQMNSLRAEDTAVYYCARDYEATIPFDFWG
QGTLVTVSS
HCDR1:
(SEQ ID NO: 576)
GFTFNIFE
HCDR2:
(SEQ ID NO: 577)
ISSRGTTT
HCDR3:
(SEQ ID NO: 578)
ARDYEATIPFDF
LCVR (V_{L}) Nucleotide Sequence
(SEQ ID NO: 579)
GACATCCAGATGACCCAGTCTCCATCCTCCCTGTCTGCATCTGTAGGAGACAGAG
TCACCATCACTTGCCGGGCAAGTCAGAGCATTAGCAGCTATTTAAATTGGTATCA
GCAGAAACCAGGGAAAGCCCCTAAGCTCCTGATCTATGCTGCATCCAGTTTGCAA
AGTGGGGTCCCGTCAAGGTTCAGTGGCAGTGGATCTGGGACAGATTTCACTCTCA
CCATCAGCAGTCTGCAACCTGAAGATTTTGCAACTTACTACTGTCAACAGAGTTA
CAGTACCCCTCCGATCACCTTCGGCCAAGGGACACGACTGGAGATTAAA
LCVR (V_{L}) Amino Acid Sequence
(SEQ ID NO: 580)
DIQMTQSPSSLSASVGDRVTITCRASQSISSYLNWYQQKPGKAPKLLIYAASSLQ
SGVPSRFSGSGSGTDFTLTISSLQPEDFATYYCQQSYSTPPITFGQGTRLEIK
LCDR1:
(SEQ ID NO: 581)
QSISSY
LCDR2:
(SEQ ID NO: 582)
AAS
LCDR3:
(SEQ ID NO: 583)
QQSYSTPPIT
12844B
HCVR (V_{H}) Nucleotide Sequence
(SEQ ID NO: 584)
GAGGTGCAGCTGGTGGAGTCTGGGGGAAGTGTGGTACGGCCTGGGGGGTCCCTGA
GACTCTCCTGTGAAGCCTCTGGATTCACCTTTGATGATTATGGCATGAGCTGGGT
CCGCCAAGATCCAGGGAAGGGGCTGGAGTGGGTCTCTGGTATTAATTGGAATGGT
GATAGAACAAATTATGCAGACTCTGTGAAGGGCCGATTCATCATTTCCAGAGACA
ACGCCAAGAACTCTGTGTATCTACAAATGAACAGTCTGAGAGCGGAGGACTCGGC
CTTGTATCACTGTGCGAGAGATCAGGGACTCGGAGTGGCAGCTACCCTTGACTAC
TGGGGCCAGGGAACCCTGGTCACCGTCTCCTCA
HCVR (V_{H}) Amino Acid Sequence
(SEQ ID NO: 585)
EVQLVESGGSVVRPGGSLRLSCEASGFTFDDYGMSWVRQDPGKGLEWVSGINWNG
DRTNYADSVKGRFIISRDNAKNSVYLQMNSLRAEDSALYHCARDQGLGVAATLDY
WGQGTLVTVSS
HCDR1:
(SEQ ID NO: 586)
GFTFDDYG
HCDR2:
(SEQ ID NO: 587)
INWNGDRT
HCDR3:
(SEQ ID NO: 588)
ARDQGLGVAATLDY
LCVR (V_{L}) Nucleotide Sequence
(SEQ ID NO: 589)
GACATCCAGATGACCCAGTCTCCATCCTCCCTGTCTGCATCTGTAGGAGACAGAG
TCACCATCACTTGCCGGGCAAGTCAGAGCATTAGCAGCTATTTAAATTGGTATCA
GCAGAAACCAGGGAAAGCCCCTAAGCTCCTGATCTATGCTGCATCCAGTTTGCAA
AGTGGGGTCCCGTCAAGGTTCAGTGGCAGTGGATCTGGGACAGATTTCACTCTCA
CCATCAGCAGTCTGCAACCTGAAGATTTTGCAACTTACTACTGTCAACAGAGTTA
CAGTACCCCTCCGATCACCTTCGGCCAAGGGACACGACTGGAGATTAAA
LCVR (V_{L}) Amino Acid Sequence
(SEQ ID NO: 590)
DIQMTQSPSSLSASVGDRVTITCRASQSISSYLNWYQQKPGKAPKLLIYAASSLQ
SGVPSRFSGSGSGTDFTLTISSLQPEDFATYYCQQSYSTPPITFGQGTRLEIK
LCDR1:
(SEQ ID NO: 591)
QSISSY
LCDR2:
(SEQ ID NO: 592)
AAS
LCDR3:
(SEQ ID NO: 593)
QQSYSTPPIT
12845B (REGN17082 Fab; REGN17076 scFv;
REGN16825 anti-hTfR scFv: hGAA)
HCVR (V_{H}) Nucleotide Sequence
(SEQ ID NO: 594)
GAGGTGCAGCTGGTGGAGTCTGGGGGAGGCTTGGTACAGCCTGGAGGGTCCCTGA
GACTCTCCTGTGCAGCCTCTGGATTCACCGTCAGTAATTATGAAATGAACTGGGT
CCGCCAGGCTCCAGGGAAGGGGCTGGAGTGGGTTTCATACATTAGTAGTAGTACC
AGTAACATATACTACGCAGACTCTGTGAAGGGCCGATTCACCATCTCCAGAGACA
ACGCCGAGAACTCACTGTATCTGCAGATGAACAGCCTGAGAGTCGAGGACACGGC
TGTTTATTACTGTGTGAGAGATGGGATTGTAGTAGTTCCAGTTGGTCGTGGATAC
TACTATTACGGTTTGGACGTCTGGGGCCAAGGGACCACGGTCACCGTCTCCTCA
HCVR (V_{H}) Amino Acid Sequence
(SEQ ID NO: 595)
EVQLVESGGGLVQPGGSLRLSCAASGFTVSNYEMNWVRQAPGKGLEWVSYISSST
SNIYYADSVKGRFTISRDNAENSLYLQMNSLRVEDTAVYYCVRDGIVVVPVGRGY
YYYGLDVWGQGTTVTVSS
HCDR1:
(SEQ ID NO: 596)
GFTVSNYE
HCDR2:
(SEQ ID NO: 597)
ISSSTSNI
HCDR3:
(SEQ ID NO: 598)
VRDGIVVVPVGRGYYYYGLDV
LCVR (V_{L}) Nucleotide Sequence
(SEQ ID NO: 599)
GACATCCAGATGACCCAGTCTCCATCCTCCCTGTCTGCATCTGTAGGAGACAGAG
TCACCATCACTTGCCGGGCAAGTCAGAGCATTAGCAGCTATTTAAATTGGTATCA
GCAGAAACCAGGGAAAGCCCCTAAGCTCCTGATCTATGCTGCATCCAGTTTGCAA
AGTGGGGTCCCGTCAAGGTTCAGTGGCAGTGGATCTGGGACAGATTTCACTCTCA
CCATCAGCAGTCTGCAACCTGAAGATTTTGCAACTTACTACTGTCAACAGAGTTA
CAGTACCCCTCCGATCACCTTCGGCCAAGGGACACGACTGGAGATTAAA
LCVR (V_{L}) Amino Acid Sequence
(SEQ ID NO: 600)
DIQMTQSPSSLSASVGDRVTITCRASQSISSYLNWYQQKPGKAPKLLIYAASSLQ
SGVPSRFSGSGSGTDFTLTISSLQPEDFATYYCQQSYSTPPITFGQGTRLEIK
LCDR1:
(SEQ ID NO: 601)
QSISSY
LCDR2:
(SEQ ID NO: 602)
AAS
LCDR3:
(SEQ ID NO: 603)
QQSYSTPPIT
12839B (REGN17080 Fab; REGN17074 scFv;
REGN16822 anti-hTfR scFv: hGAA)
HCVR (V_{H}) Nucleotide Sequence
(SEQ ID NO: 604)
CAGGTGCAGCTGGTGGAGTCTGGGGGAGGCGTGGTCCAGCCTGGAAGGTCCCTGA
GACTCTCCTGCGCAGCCTCTGGATTCCCCTTTAGTAATTATGTCATGTATTGGGT
CCGCCAGGCTCCAGGCAAGGGGCTGGAGTGGGTGGCTCTTATTTTTTTTGACGGA
AAGAAAAACTATCATGCAGACTCCGTGAAGGGCCGATTCACCATAACCAGAGACA
ATTCCAAAAATATGTTATATCTGCAAATGAACAGCCTGAGACCTGAGGACGCGGC
TGTGTATTACTGTGCGAAAATCCATTGTCCTAATGGTGTATGTTACAAGGGGTAT
TACGGAATGGACGTCTGGGGCCAAGGGACCACGGTCACCGTCTCCTCA
HCVR (V_{H}) Amino Acid Sequence
(SEQ ID NO: 605)
QVQLVESGGGVVQPGRSLRLSCAASGFPFSNYVMYWVRQAPGKGLEWVALIFFDG
KKNYHADSVKGRFTITRDNSKNMLYLQMNSLRPEDAAVYYCAKIHCPNGVCYKGY
YGMDVWGQGTTVTVSS
HCDR1:
(SEQ ID NO: 606)
GFPFSNYV
HCDR2:
(SEQ ID NO: 607)
IFFDGKKN
HCDR3:
(SEQ ID NO: 608)
AKIHCPNGVCYKGYYGMDV
LCVR (V_{L}) Nucleotide Sequence
(SEQ ID NO: 609)
GACATCCAGATGACCCAGTCTCCATCCTCCCTGTCTGCATCTGTAGGAGACAGAG
TCACCATCACTTGCCGGGCAAGTCAGAGCATTAGCAGCTATTTAAATTGGTATCA
GCAGAAACCAGGGAAAGCCCCTAAGCTCCTGATCTATGCTGCATCCAGTTTGCAA
AGTGGGGTCCCGTCAAGGTTCAGTGGCAGTGGATCTGGGACAGATTTCACTCTCA
CCATCAGCAGTCTGCAACCTGAAGATTTTGCAACTTACTACTGTCAACAGAGTTA
CAGTACCCCTCCGATCACCTTCGGCCAAGGGACACGACTGGAGATTAAA
LCVR (V_{L}) Amino Acid Sequence
(SEQ ID NO: 610)
DIQMTQSPSSLSASVGDRVTITCRASQSISSYLNWYQQKPGKAPKLLIYAASSLQ
SGVPSRFSGSGSGTDFTLTISSLQPEDFATYYCQQSYSTPPITFGQGTRLEIK
LCDR1:
(SEQ ID NO: 611)
QSISSY
LCDR2:
(SEQ ID NO: 612)
AAS
LCDR3:
(SEQ ID NO: 613)
QQSYSTPPIT
12841B (REGN16823 anti-hTfR scFv: hGAA)
HCVR (V_{H}) Nucleotide Sequence
(SEQ ID NO: 614)
GAGGTGCAGCTGGTGGAGTCTGGGGGAGGCTTGGTCCAGCCTGGGGGGTCCCTAA
GACTCTCCTGTGCAGCCTCTGGATTCACCTTTAGTAACTATTGGATGAACTGGGT
CCGCCAGGCTCCAGGGAAGGGACTGGAGTGGGTGGCCAATATAAAAGAAGATGGA
GGTAAGAAATTGTATGTGGACTCTGTGAAGGGCCGATTCACCATCTCCAGAGACA
ACGCCAAGAACTCACTGTTTCTGCAAATGAACAGCCTGAGAGCCGAGGACACGGC
TGTGTATTATTGTGCGAGAGAAGATACAACTTTGGTTGTGGACTACTACTACTAC
GGTATGGACGTCTGGGGCCAAGGGACCACGGTCACCGTCTCCTCA
HCVR (V_{H}) Amino Acid Sequence
(SEQ ID NO: 615)
EVQLVESGGGLVQPGGSLRLSCAASGFTFSNYWMNWVRQAPGKGLEWVANIKEDG
GKKLYVDSVKGRFTISRDNAKNSLFLQMNSLRAEDTAVYYCAREDTTLVVDYYYY
GMDVWGQGTTVTVSS
HCDR1:
(SEQ ID NO: 616)
GFTFSNYW
HCDR2:
(SEQ ID NO: 617)
IKEDGGKK
HCDR3:
(SEQ ID NO: 618)
AREDTTLVVDYYYYGMDV
LCVR (V_{L}) Nucleotide Sequence
(SEQ ID NO: 619)
GACATCCAGATGACCCAGTCTCCATCCTCCCTGTCTGCATCTGTAGGAGACAGAG
TCACCATCACTTGCCGGGCAAGTCAGAGCATTAGCAGCTATTTAAATTGGTATCA
GCAGAAACCAGGGAAAGCCCCTAAGCTCCTGATCTATGCTGCATCCAGTTTGCAA
AGTGGGGTCCCGTCAAGGTTCAGTGGCAGTGGATCTGGGACAGATTTCACTCTCA
CCATCAGCAGTCTGCAACCTGAAGATTTTGCAACTTACTACTGTCAACAGAGTTA
CAGTACCCCTCCGATCACCTTCGGCCAAGGGACACGACTGGAGATTAAA
LCVR (V_{L}) Amino Acid Sequence
(SEQ ID NO: 620)
DIQMTQSPSSLSASVGDRVTITCRASQSISSYLNWYQQKPGKAPKLLIYAASSLQ
SGVPSRFSGSGSGTDFTLTISSLQPEDFATYYCQQSYSTPPITFGQGTRLEIK
LCDR1:
(SEQ ID NO: 621)
QSISSY
LCDR2:
(SEQ ID NO: 622)
AAS
LCDR3:
(SEQ ID NO: 623)
QQSYSTPPIT
12850B (REGN16828 anti-hTfR scFv: hGAA)
HCVR (V_{H}) Nucleotide Sequence
(SEQ ID NO: 624)
CAGGTCCAGCTGGTGCAGTCTGGGGCTGAGGTGAAGAAGCCTGGGTCCTCGGTGA
AGGTCTCCTGCAAGGCTTCTGGAGGCACCTTCAACACCTATGCTATCACCTGGGT
GCGACAGGCCCCTGGACAAGGGCTTGAATGGATGGGGGGAATCATCCCTATCTCT
GGCATAGCAGAGTACGCACAGAAGTTCCAGGGCAGAGTCACGATCACCACGGATG
ACTCCTCGACCACAGCCTACATGGAACTGAACAGTCTGAGATCTGAGGACACGGC
CGTGTATTACTGTGCGAGCTGGAACTACGCACTCTACTACTTCTACGGTATGGAC
GTCTGGGGCCGAGGGACCACGGTCACCGTCTCCTCA
HCVR (V_{H}) Amino Acid Sequence
(SEQ ID NO: 625)
QVQLVQSGAEVKKPGSSVKVSCKASGGTFNTYAITWVRQAPGQGLEWMGGIIPIS
GIAEYAQKFQGRVTITTDDSSTTAYMELNSLRSEDTAVYYCASWNYALYYFYGMD
VWGRGTTVTVSS
HCDR1:
(SEQ ID NO: 626)
GGTFNTYA
HCDR2:
(SEQ ID NO: 627)
IIPISGIA
HCDR3:
(SEQ ID NO: 628)
ASWNYALYYFYGMDV
LCVR (V_{L}) Nucleotide Sequence
(SEQ ID NO: 629)
GAAATTGTGTTGACGCAGTCTCCAGGCACCCTGTCTTTGTCTCCAGGGGAAAGAG
CCACCCTCTCCTGCAGGGCCAGTCAGAGTGTTAGCAGCAGCTACTTAGCCTGGTA
CCAGCAGAAACCTGGCCAGGCTCCCAGGCTCCTCATCTATGGTGCATCCAGCAGG
GCCACTGGCATCCCAGACAGGTTCAGTGGCAGTGGGTCTGGGACAGACTTCACTC
TCACCATCAGCAGACTGGAGCCTGAAGATTTTGCAGTGTATTACTGTCAGCAGTA
TGGTAGCTCACCTTGGACGTTCGGCCAAGGGACCAAGGTGGAAATCAAA
LCVR (V_{L}) Amino Acid Sequence
(SEQ ID NO: 630)
EIVLTQSPGTLSLSPGERATLSCRASQSVSSSYLAWYQQKPGQAPRLLIYGASSR
ATGIPDRFSGSGSGTDFTLTISRLEPEDFAVYYCQQYGSSPWTFGQGTKVEIK
LCDR1:
(SEQ ID NO: 631)
QSVSSSY
LCDR2:
(SEQ ID NO: 632)
GAS
LCDR3:
(SEQ ID NO: 633)
QQYGSSPWT
69261
HCVR (V_{H}) Nucleotide Sequence
(SEQ ID NO: 634)
CAGGTGCAGCTGGTGGAGTCTGGGGGAGGCTTGGTCAAGCCTGGAGGGTCCCTGA
GACTCTCCTGTGCAGCCTCTGGATTCACCTTCAGTGTCTATTACATGAACTGGAT
CCGCCAGGCTCCAGGGAAGGGCCTGGAGTGGGTTTCATACATTAGTAGTAGTGGT
AGTACCATATACTACGCAGACTCTGTGAAGGGCCGATTCACCATCTCCAGGGACA
ACGCCAAGAACTCACTGTATCTCCAAATGAACAGTCTGAGAGCCGAGGACACGGC
CGTATATTACTGTGGGAGAGAAGGGTATAGTGGGACTTATTCTTATTACGGTATG
GACGTCTGGGGCCAAGGGACCACGGTCACCGTCTCCTCA
HCVR (V_{H}) Amino Acid Sequence
(SEQ ID NO: 635)
QVQLVESGGGLVKPGGSLRLSCAASGFTFSVYYMNWIRQAPGKGLEWVSYISSSG
STIYYADSVKGRFTISRDNAKNSLYLQMNSLRAEDTAVYYCGREGYSGTYSYYGM
DVWGQGTTVTVSS
HCDR1:
(SEQ ID NO: 636)
GFTFSVYY
HCDR2:
(SEQ ID NO: 637)
ISSSGSTI
HCDR3:
(SEQ ID NO: 638)
GREGYSGTYSYYGMDV
LCVR (V_{L}) Nucleotide Sequence
(SEQ ID NO: 639)
GATATTGTGATGACTCAGTCTCCACTCTCCCTGCCCGTCACCCCTGGAGAGCCGG
CCTCCATCTCCTGCAGGTCTAGTCAGAGCCTCCTGCATAGTAATGGATACAACTA
TTTGGATTGGTACCTGCAGAAGCCAGGGCAGTCTCCACAGTTCCTGATCTATTTG
GGTTCTAATCGGGCCTCCGGGGTCCCTGACAGGTTCAGTGGCAGTGGATCAGGCA
CAGATTTTACACTGAAAATCAACAGAGTGGAGGCTGAGGATGTTGGGGTTTATTA
CTGCATGCAAGCTCTACAAACTCCGTACACTTTTGGCCAGGGGACCAAGCTGGAG
ATCAAA
LCVR (V_{L}) Amino Acid Sequence
(SEQ ID NO: 640)
DIVMTQSPLSLPVTPGEPASISCRSSQSLLHSNGYNYLDWYLQKPGQSPQFLIYL
GSNRASGVPDRFSGSGSGTDFTLKINRVEAEDVGVYYCMQALQTPYTFGQGTKLE
IK
LCDR1:
(SEQ ID NO: 641)
QSLLHSNGYNY
LCDR2:
(SEQ ID NO: 642)
LGS
LCDR3:
(SEQ ID NO: 643)
MQALQTPYT
69263
HCVR (V_{H}) Nucleotide Sequence
(SEQ ID NO: 644)
GAAGTGCAGCTGGTGGAGTCTGGGGGAGGGTTGGTACAGCCTGGCAGGTCCCTGA
GACTCTCCTGTGCAGTCTCTGGATTCACCTTTGATGATTATGCCATGCACTGGGT
CCGGCAAGCTCCAGGGAAGGGCCTGGAGTGGGTCTCAGGTATTAGTTGGAATAGT
GGTACCAGAGGATATGCGGACTCTGTGAAGGGCCGATTCACCATCTCCAGAGACA
ACGCCAAGAACTCCCTGTATCTGCAAATGAACAGTCTGAGAGGTGAGGACACGGC
CTTGTATTACTGTGTAAAAGATATTACGATATCCCCCAACTACTACGGTATGGAC
GTCTGGGGCCAAGGGACCACGGTCACCGTCTCCTCA
HCVR (V_{H}) Amino Acid Sequence
(SEQ ID NO: 645)
EVQLVESGGGLVQPGRSLRLSCAVSGFTFDDYAMHWVRQAPGKGLEWVSGISWNS
GTRGYADSVKGRFTISRDNAKNSLYLQMNSLRGEDTALYYCVKDITISPNYYGMD
VWGQGTTVTVSS
HCDR1:
(SEQ ID NO: 646)
GFTFDDYA
HCDR2:
(SEQ ID NO: 647)
ISWNSGTR
HCDR3:
(SEQ ID NO: 648)
VKDITISPNYYGMDV
LCVR (V_{L}) Nucleotide Sequence
(SEQ ID NO: 649)
GACATCCAGATGACCCAGTCTCCATCCTCCCTGTCTGCATCTGTAGGAGACAGAG
TCACCATCACTTGCCGGGCGAGTCAGGACATTAGCCATTATTCAGCCTGGTATCA
GCAGAAACCAGGGAAACTTCCTAACCTCCTGATCTATGCTGCATCCACTTTGCAA
TCAGGGGTCCCATCTCGGTTCAGTGGCAGTGGATCTGGGACAGATTTCTCTCTCA
CCACCAGCAGCCTGCAGCCTGAAGATGTTGCAACTTATTACTGTCAAAAGTATAA
CAGTGTCCCTCTCACTTTCGGCGGAGGGACCAAGGTGGAGATCAAA
LCVR (V_{L}) Amino Acid Sequence
(SEQ ID NO: 650)
DIQMTQSPSSLSASVGDRVTITCRASQDISHYSAWYQQKPGKLPNLLIYAASTLQ
SGVPSRFSGSGSGTDFSLTTSSLQPEDVATYYCQKYNSVPLTFGGGTKVEIK
LCDR1:
(SEQ ID NO: 651)
QDISHY
LCDR2:
(SEQ ID NO: 652)
AAS
LCDR3:
(SEQ ID NO: 653)
QKYNSVPLT

[0525] In some multidomain therapeutic proteins, the TfR-binding delivery domain is an antibody, an antibody fragment or other antigen-binding protein. In some multidomain therapeutic proteins, the TfR-binding delivery domain is an antigen-binding protein. Examples of antigen-binding proteins include, for example, a receptor-fusion molecule, a trap molecule, a receptor-Fc fusion molecule, an antibody, an Fab fragment, an F(ab′)2 fragment, an Fd fragment, an Fv fragment, a single-chain Fv (scFv) molecule, a dAb fragment, an isolated complementarity determining region (CDR), a CDR3 peptide, a constrained FR3-CDR3-FR4 peptide, a domain-specific antibody, a single domain antibody, a domain-deleted antibody, a chimeric antibody, a CDR-grafted antibody, a diabody, a triabody, a tetrabody, a minibody, a nanobody, a monovalent nanobody, a bivalent nanobody, a small modular immunopharmaceutical (SMIP), a camelid antibody (VHH heavy chain homodimeric antibody), and a shark variable IgNAR domain.

[0526] Provided herein are antibodies that bind specifically to the human transferrin receptor 1. The term “antibody,” as used herein, refers to immunoglobulin molecules comprising four polypeptide chains, two heavy chains (HCs) and two light chains (LCs), inter-connected by disulfide bonds. In an embodiment, each antibody heavy chain (HC) comprises a heavy chain variable region (“HCVR” or “V_{H}”) (e.g., comprising SEQ ID NO: 335, 345, 355, 365, 375, 385, 395, 405, 415, 425, 435, 445, 455, 465, 475, 485, 495, 505, 515, 525, 535, 545, 555, 565, 575, 585, 595, 605, 615, 625, 635, and/or 645 or a variant thereof) and a heavy chain constant region (e.g., human IgG, human IgG1 or human IgG4); and each antibody light chain (LC) comprises a light chain variable region (“LCVR or “V_{L}”) (e.g., SEQ ID NO: 340, 350, 360, 370, 380, 390, 400, 410, 420, 430, 440, 450, 460, 470, 480, 490, 500, 510, 520, 530, 540, 550, 560, 570, 580, 590, 600, 610, 620, 630, 640, and/or 650 or a variant thereof) and a light chain constant region (e.g., human kappa or human lambda). The V_{H} and V_{L} regions can be further subdivided into regions of hypervariability, termed complementarity determining regions (CDR), interspersed with regions that are more conserved, termed framework regions (FR). Each V_{H} and V_{L} comprises three CDRs and four FRs. Anti-TfR antibodies disclosed herein can also be fused to GAA.

[0527] An anti-TfR antigen-binding protein of the present invention may be an antigen-binding fragment of an antibody which may be tethered to GAA. The terms “antigen-binding portion” or “antigen-binding fragment” of an antibody, as used herein, refers to an immunoglobulin molecule that binds antigen but that does not include all of the sequences of a full antibody (preferably, the full antibody is an IgG). Non-limiting examples of antigen-binding fragments include: (i) Fab fragments; (ii) F(ab′)2 fragments; (iii) Fd fragments; (iv) Fv fragments; (v) single-chain Fv (scFv) molecules; and (vi) dAb fragments; consisting of the amino acid residues that mimic the hypervariable region of an antibody (e.g., an isolated complementarity determining region (CDR) such as a CDR3 peptide), or a constrained FR3-CDR3-FR4 peptide. Other engineered molecules, such as domain-specific antibodies, single domain antibodies, domain-deleted antibodies, chimeric antibodies, CDR-grafted antibodies, diabodies, triabodies, tetrabodies, minibodies and small modular immunopharmaceuticals (SMIPs), are also encompassed within the expression “antigen-binding fragment,” as used herein.

[0528] An anti-TfR antigen-binding protein may be an scFv which may be tethered to a GAA. An scFv (single chain fragment variable) has variable regions of heavy (V_{H}) and light (V_{L}) domains (in either order), which, preferably, are joined together by a flexible linker (e.g., peptide linker). The length of the flexible linker used to link both of the V regions may be important for yielding the correct folding of the polypeptide chain. Previously, it has been estimated that the peptide linker must span 3.5 nm (35 Å) between the carboxy terminus of the variable domain and the amino terminus of the other domain without affecting the ability of the domains to fold and form an intact antigen-binding site (Huston et al., Protein engineering of single-chain Fv analogs and fusion proteins. Methods in Enzymology. 1991; 203:46-88). In an embodiment, the linker comprises an amino acid sequence of such length to separate the variable domains by about 3.5 nm.

[0529] An antigen-binding fragment of an antibody will, in an embodiment, comprise at least one variable domain. The variable domain may be of any size or amino acid composition and will generally comprise at least one CDR, which is adjacent to or in frame with one or more framework sequences. In antigen-binding fragments having a V_{H} domain associated with a V_{L} domain, the V_{H} and V_{L} domains may be situated relative to one another in any suitable arrangement. For example, the variable region may be dimeric and contain V_{H}-V_{H}, V_{H}-V_{L} or V_{L}-V_{L} dimers. Alternatively, the antigen-binding fragment of an antibody may contain a monomeric V_{H} or V_{L} domain.

[0530] “Isolated” antigen-binding proteins (e.g., antibodies or antigen-binding fragments thereof), polypeptides, polynucleotides and vectors, are at least partially free of other biological molecules from the cells or cell culture from which they are produced. Such biological molecules include nucleic acids, proteins, other antibodies or antigen-binding fragments, lipids, carbohydrates, or other material such as cellular debris and growth medium. An isolated antigen-binding protein may further be at least partially free of expression system components such as biological molecules from a host cell or of the growth medium thereof. Generally, the term “isolated” is not intended to refer to a complete absence of such biological molecules (e.g., minor or insignificant amounts of impurity may remain) or to an absence of water, buffers, or salts or to components of a pharmaceutical formulation that includes the antigen-binding proteins (e.g., antibodies or antigen-binding fragments).

[0531] An anti-TfR antigen-binding protein of the present invention may be a monoclonal antibody or an antigen-binding fragment of a monoclonal antibody which may be tethered to GAA. The present invention includes monoclonal anti-TfR antigen-binding proteins, e.g., antibodies and antigen-binding fragments thereof, as well as monoclonal compositions comprising a plurality of isolated monoclonal antigen-binding proteins. The term “monoclonal antibody” or “mAb,” as used herein, refers to a member of a population of substantially homogeneous antibodies, i.e., the antibody molecules comprising the population are identical in amino acid sequence except for possible naturally occurring mutations that may be present in minor amounts. A “plurality” of such monoclonal antibodies and fragments in a composition refers to a concentration of identical (i.e., as discussed above, in amino acid sequence except for possible naturally occurring mutations that may be present in minor amounts) antibodies and fragments which is above that which would normally occur in nature, e.g., in the blood of a host organism such as a mouse or a human.

[0532] In an embodiment, an anti-TfR antigen-binding protein, e.g., antibody or antigen-binding fragment (which may be tethered to a Payload) comprises a heavy chain constant domain, e.g., of the type IgA (e.g., IgA1 or IgA2), IgD, IgE, IgG (e.g., IgG1, IgG2, IgG3 and IgG4) or IgM. In an embodiment of the invention, an antigen-binding protein, e.g., antibody or antigen-binding fragment, comprises a light chain constant domain, e.g., of the type kappa or lambda.

[0533] Included herein are human anti-TfR antigen-binding proteins which may be tethered to GAA. The term “human” antigen-binding protein, such as an antibody or antigen-binding fragment, as used herein, includes antibodies and fragments having variable and constant regions derived from human germline immunoglobulin sequences whether in a human cell or grafted into a non-human cell, e.g., a mouse cell. See, e.g., U.S. Pat. Nos. 8,502,018, 6,596,541 or 5,789,215. The anti-TfR human mAbs of the invention may include amino acid residues not encoded by human germline immunoglobulin sequences (e.g., mutations introduced by random or site-specific mutagenesis in vitro or by somatic mutation in vivo), for example, in the CDRs and in particular CDR3. However, the term “human antibody,” as used herein, is not intended to include mAbs in which CDR sequences derived from the germline of another mammalian species (e.g., mouse) have been grafted onto human FR sequences. The term includes antibodies recombinantly produced in a non-human mammal or in cells of a non-human mammal. The term is not intended to include natural antibodies directly isolated from a human subject.

[0534] Also included herein are anti-TfR chimeric antigen-binding proteins, e.g., antibodies and antigen-binding fragments thereof (which may be tethered to GAA), and methods of use thereof. As used herein, a “chimeric antibody” is an antibody having the variable domain from a first antibody and the constant domain from a second antibody, where the first and second antibodies are from different species. (see, e.g., U.S. Pat. No. 4,816,567; and Morrison et al., (1984) Proc. Natl. Acad. Sci. USA 81: 6851-6855).

[0535] The term “recombinant” anti-TfR antigen-binding proteins, such as antibodies or antigen-binding fragments thereof (which may be tethered to GAA), refers to such molecules created, expressed, isolated or obtained by technologies or methods known in the art as recombinant DNA technology which include, e.g., DNA splicing and transgenic expression. The term includes antibodies expressed in a non-human mammal (including transgenic non-human mammals, e.g., transgenic mice), or a cell (e.g., CHO cells) such as a cellular expression system or isolated from a recombinant combinatorial human antibody library.

[0536] A “variant” of a polypeptide refers to a polypeptide comprising an amino acid sequence that is at least about 70-99.9% (e.g., 70, 72, 74, 75, 76, 79, 80, 81, 82, 83, 84, 85, 86, 87, 88, 89, 90, 91, 92, 93, 94, 95, 96, 97, 98, 99, 99.5, 99.9%) identical or similar to a referenced amino acid sequence that is set forth herein (e.g., any of SEQ ID NOs: 335-338; 340-343; 345-348; 350-353; 355-358; 360-363; 365-368; 370-373; 375-378; 380-383; 385-388; 390-393; 395-398; 400-403; 405-408; 410-413; 415-418; 420-423; 425-428; 430-433; 435-438; 440-443; 445-448; 450-453; 455-458; 460-463; 465-468; 470-473; 475-478; 480-483; 485-488; 490-493; 495-498; 500-503; 505-508; 510-513; 515-518; 520-523; 525-528; 530-533; 535-538; 540-543; 545-548; 550-553; 555-558; 560-563; 565-568; 570-573; 575-578; 580-583; 585-588; 590-593; 595-598; 600-603; 605-608; 610-613; 615-618; 620-623; 625-628; 630-633; 635-638; 640-643; 645-648; 650-653; 821 (optionally not including the N-terminal MHRPRRRGTRPPPLALLAALLLAARGADA (SEQ ID NO: 791)), 822 (optionally not including the N-terminal MHRPRRRGTRPPPLALLAALLLAARGADA (SEQ ID NO: 791)), 823 (optionally not including the N-terminal MHRPRRRGTRPPPLALLAALLLAARGADA (SEQ ID NO: 791)), 824 (optionally not including the N-terminal MHRPRRRGTRPPPLALLAALLLAARGADA (SEQ ID NO: 791)); 656-691, 721-790, or 793-820); when the comparison is performed by a BLAST algorithm wherein the parameters of the algorithm are selected to give the largest match between the respective sequences over the entire length of the respective reference sequences (e.g., expect threshold: 10; word size: 3; max matches in a query range: 0; BLOSUM 62 matrix; gap costs: existence 11, extension 1; conditional compositional score matrix adjustment) and/or comprising the amino acid sequence but having one or more (e.g., 1, 2, 3, 4, 5, 6, 7, 8, 9 or 10) mutations (e.g., point mutation, insertion, truncation, and/or deletion). Preferably, functional GAA ectodomain.

[0537] The following references relate to BLAST algorithms often used for sequence analysis: BLAST ALGORITHMS: Altschul et al. (2005) FEBS J. 272(20): 5101-5109; Altschul, S. F., et al., (1990) J. Mol. Biol. 215:403-410; Gish, W., et al., (1993) Nature Genet. 3:266-272; Madden, T. L., et al., (1996) Meth. Enzymol. 266:131-141; Altschul, S. F., et al., (1997) Nucleic Acids Res. 25:3389-3402; Zhang, J., et al., (1997) Genome Res. 7:649-656; Wootton, J. C., et al., (1993) Comput. Chem. 17:149-163; Hancock, J. M. et al., (1994) Comput. Appl. Biosci. 10:67-70; ALIGNMENT SCORING SYSTEMS: Dayhoff, M. O., et al., “A model of evolutionary change in proteins.” in Atlas of Protein Sequence and Structure, (1978) vol. 5, suppl. 3. M. O. Dayhoff (ed.), pp. 345-352, Natl. Biomed. Res. Found., Washington, D.C.; Schwartz, R. M., et al., “Matrices for detecting distant relationships.” in Atlas of Protein Sequence and Structure, (1978) vol. 5, suppl. 3.” M. O. Dayhoff (ed.), pp. 353-358, Natl. Biomed. Res. Found., Washington, D.C.; Altschul, S. F., (1991) J. Mol. Biol. 219:555-565; States, D. J., et al., (1991) Methods 3:66-70; Henikoff, S., et al., (1992) Proc. Natl. Acad. Sci. USA 89:10915-10919; Altschul, S. F., et al., (1993) J. Mol. Evol. 36:290-300; ALIGNMENT STATISTICS: Karlin, S., et al., (1990) Proc. Natl. Acad. Sci. USA 87:2264-2268; Karlin, S., et al., (1993) Proc. Natl. Acad. Sci. USA 90:5873-5877; Dembo, A., et al., (1994) Ann. Prob. 22:2022-2039; and Altschul, S. F. “Evaluating the statistical significance of multiple distinct local alignments.” in Theoretical and Computational Methods in Genome Research (S. Suhai, ed.), (1997) pp. 1-14, Plenum, N.Y.

[0538] In an embodiment of the invention, an anti-hTfR:Payload or anti-hTfR:Payload (e.g., in scFv, Fab, antibody or antigen-binding fragment thereof format), e.g., wherein the Payload is human GAA, exhibits one or more of the following characteristics:
[0539] Affinity (K_{D}) for binding to human TfR at 25° C. in surface plasmon resonance format of about 41 nM or a higher affinity (e.g., about 1 or 0.1 nM or about 0.18 to about 1.2 nM, or higher);
[0540] Affinity (K_{D}) for binding to monkey TfR at 25° C. in surface plasmon resonance format of about 0 nM (no detectable binding) or a higher affinity (e.g., about 20 nM or higher);
[0541] Ratio of K_{D} for binding to monkey TfR/human TfR at 25° C. in surface plasmon resonance format of from 0 to 278 (e.g., about 17 or 18);
[0542] Blocks about 3, 5, 10 or 13% hTfR (e.g., Hmm-hTFRC such as REGN2431) binding to Human Holo-Tf when in Fab format (IgG1), e.g., no more than about 45% blocking;
[0543] Blocks about 6, 8, 10 or 13% hTfR (e.g., Hmm-hTFRC such as REGN2431) binding to Human Holo-Tf when in scFv (V_{K}-V_{H}) format, e.g., no more than about 45% blocking;
[0544] Blocks about 11, 17, 23 or 26% hTfR (e.g., Hmm-hTFRC such as REGN2431) binding to Human Holo-Tf when in scFv (V_{H}-V_{L}) format, e.g., no more than about 45% blocking;
[0545] Exhibits a ratio of about 1 or greater; 0.67 or greater; 1.08 or greater; 0.91 or greater; 0.65 or greater; 0.55 or greater; 0.50 or greater; 0.27 or greater; 0.72 or greater; 1.05 or greater; 0.49 or greater; 0.29 or greater; 1.29 or greater; 1.72 or greater; 1.79 or greater; 3.08 or greater; 1.24 or greater; 0.59 or greater; or 0.47 or greater (or about 1-2 or greater) mature hGAA protein in brain (normalized to that of positive control 8D3:GAA scFv) in mice (e.g., Tfrc^{hum/hum} knock-in mice) administered the molecule via HDD, when in anti-hTfR scFv:hGAA format; or delivers mature human GAA protein to the brain of humans administered said scFv:hGAA molecule;
[0546] Exhibits a ratio of about 0.44, 0.05, 1.13 or 0.60 (about 0.1-1.2) mature hGAA protein in brain parenchyma (normalized to that of positive control 8D3:GAA scFv) in mice (e.g., Tfrc^{hum/hum} knock-in mice) administered the molecule via HDD, when in anti-hTfR scFv:hGAA format; or delivers mature human GAA protein to the brain parenchyma of humans administered said scFv:hGAA molecule;
[0547] Exhibits a ratio of about 0.67, 1.80, 1.78 or 7.74 (about 1-2) mature hGAA protein in quadriceps (normalized to that of positive control 8D3:GAA scFv) in mice (e.g., Tfrc^{hum/hum} knock-in mice) administered the molecule via HDD, when in anti-hTfR scFv:hGAA format; or delivers mature human GAA protein to the quadricep or other muscle tissue of humans administered said scFv:hGAA molecule;
[0548] Exhibits a ratio of about 0.94, 0.49, 0.61 or 1.90 (about 0.1-1.2) mature hGAA protein in brain parenchyma (normalized to that of positive control 8D3:GAA scFv) in mice (e.g., Tfrc^{hum} knock-in mice) administered the molecule via AAV8 liver depot, when in anti-hTfR scFv:hGAA format; or delivers mature human GAA protein to the brain parenchyma of humans administered said scFv:hGAA molecule via viral, e.g., AAV, liver depot or parenterally delivered in protein scFv:hGAA fusion format;
[0549] Delivers mature hGAA protein to serum, liver, cerebrum, cerebellum, spinal cord, heart and/or quadricep in mice (e.g., Tfrc^{hum} knock-in mice) administered the molecule via AAV8 liver depot, when in anti-hTfR scFv:hGAA format; or delivers mature human GAA protein to the serum, liver, cerebrum, cerebellum, spinal cord, heart and/or quadricep of humans administered said scFv:hGAA molecule via viral, e.g., AAV, liver depot or parenterally delivered in protein scFv:hGAA fusion format;
[0550] Reduces glycogen stored in cerebrum, cerebellum, spinal cord, heart and/or quadricep in mice (e.g., Tfrc^{hum} knock-in mice) administered the molecule via AAV8 liver depot, when in anti-hTfR scFv:hGAA format; e.g., by at least 75% to greater than 95% or greater than 99%; or reduces glycogen stored in cerebrum, cerebellum, spinal cord, heart and/or quadricep of humans administered said scFv:hGAA molecule via viral, e.g., AAV, liver depot, or parenterally delivered in protein scFv:hGAA fusion format;
[0551] Reduces glycogen levels in tissues (e.g., cerebellum) of Gaa^{-/-}/Tfrc^{hum} mice treated with liver-depot AAV8 anti-hTFRC scfv:hGAA (e.g., 4e11 vg/kg AAV8) by at least about 90% (e.g., about 95% or more) relative to untreated Gaa^{-/-}/Tfrc^{hum} mice;
[0552] Reduces glycogen levels in tissues (e.g., quadricep) of Gaa^{-/-}/Tfrc^{hum} mice treated with liver-depot AAV8 anti-hTFRC scfv:hGAA (e.g., 4e11 vg/kg AAV8) by at least about 89% (e.g., about 90% or 91% or more) relative to untreated Gaa^{-/-}/Tfrc^{hum} mice; or of humans treated with the fusion, e.g., by parenteral deliver of the fusion protein;
[0553] Does not cause abnormal iron homeostasis when administered (e.g., by HDD or AAV8 episomal liver depot) to Tfrch^{hum} mice; e.g., wherein the mice maintain normal serum, heart, liver and/or spleen iron levels, normal total iron-binding capacity (TIBC), and/or normal hepcidin levels); or when administered to humans, e.g., by parenteral deliver of the fusion protein;
[0554] When chromosomally inserted (e.g., into the albumin gene locus) or delivered episomally to a subject (e.g., to a human or Gaa^{-/-}/Tfrc^{hum/hum} mouse), for example, in an AAV8 vector, DNA encoding the fusion causes expression of mature human GAA to serum, liver, cerebrum and/or quadricep; and/or
[0555] When chromosomally inserted (e.g., into the albumin gene locus) or delivered episomally (e.g., to a human or Gaa^{-/-}/Tfrc^{hum/hum} mouse), for example, in an AAV8 vector, DNA encoding the fusion reduces glycogen levels in the cerebrum and/or quadricep.
[0556] Tfrc^{hum} or Tfrc^{hum/hum} are homozygous knock-in mice.

[0557] The amino acid sequences of domains in anti-human transferrin receptor antigen-binding proteins of fusions disclosed herein are summarized below in Table 3. For example, anti-human transferrin receptor 1 antibodies and antigen-binding fragments thereof (e.g., scFvs and Fabs) comprising the HCVR and LCVR of the molecules in Table 3; or comprising the CDRs thereof, fused to GAA, are disclosed herein.

[0558] As discussed, an anti-hTfR:GAA scFv fusion protein (e.g., 31874B; 31863B; 69348; 69340; 69331; 69332; 69326; 69329; 69323; 69305; 69307; 12795B; 12798B; 12799B; 12801B; 12802B; 12808B; 12812B; 12816B; 12833B; 12834B; 12835B; 12847B; 12848B; 12843B; 12844B; 12845B; 12839B; 12841B; 12850B; 69261; or 69263) comprises an optional signal peptide, connected to an scFv (e.g., including a V_{L} and a V_{H} optionally connected by a linker), connected to an option linker, connected to a GAA. For example, the optional signal peptide can be the signal peptide from Mus musculus Ror1 (e.g., consisting of the amino acids MHRPRRRGTRPPPLALLAALLLAARGADA (SEQ ID NO: 791).

[0559] In a particular multidomain therapeutic protein, the TfR-binding delivery domain is an anti-TfR scFv. For example, the scFv can include a V_{L} and a V_{H} optionally connected by a linker.

[0560] In one example, the anti-hTfR scFv can comprise: (i) a heavy chain variable region that comprises the HCDR1, HCDR2 and HCDR3 of a HCVR comprising the amino acid sequence set forth in SEQ ID NO: 335, 345, 355, 365, 375, 385, 395, 405, 415, 425, 435, 445, 455, 465, 475, 485, 495, 505, 515, 525, 535, 545, 555, 565, 575, 585, 595, 605, 615, 625, 635, or 645; and/or (ii) a light chain variable region that comprises the LCDR1, LCDR2 and LCDR3 of a LCVR comprising the amino acid sequence set forth in SEQ ID NO: 340, 350, 360, 370, 380, 390, 400, 410, 420, 430, 440, 450, 460, 470, 480, 490, 500, 510, 520, 530, 540, 550, 560, 570, 580, 590, 600, 610, 620, 630, 640, or 650.

[0561] In another example, the anti-TfR scFv can comprise: (1) a HCVR comprising the HCDR1, HCDR2 and HCDR3 of a HCVR that comprises the amino acid sequence set forth in SEQ ID NO: 335 (or a variant thereof); and a LCVR comprising the LCDR1, LCDR2 and LCDR3 of a LCVR that comprises the amino acid sequence set forth in SEQ ID NO: 340 (or a variant thereof); (2) a HCVR comprising the HCDR1, HCDR2 and HCDR3 of a HCVR that comprises the amino acid sequence set forth in SEQ ID NO: 345 (or a variant thereof); and a LCVR comprising the LCDR1, LCDR2 and LCDR3 of a LCVR that comprises the amino acid sequence set forth in SEQ ID NO: 350 (or a variant thereof); (3) a HCVR comprising the HCDR1, HCDR2 and HCDR3 of a HCVR that comprises the amino acid sequence set forth in SEQ ID NO: 355 (or a variant thereof); and a LCVR comprising the LCDR1, LCDR2 and LCDR3 of a LCVR that comprises the amino acid sequence set forth in SEQ ID NO: 360 (or a variant thereof); (4) a HCVR comprising the HCDR1, HCDR2 and HCDR3 of a HCVR that comprises the amino acid sequence set forth in SEQ ID NO: 365 (or a variant thereof); and a LCVR comprising the LCDR1, LCDR2 and LCDR3 of a LCVR that comprises the amino acid sequence set forth in SEQ ID NO: 370 (or a variant thereof); (5) a HCVR comprising the HCDR1, HCDR2 and HCDR3 of a HCVR that comprises the amino acid sequence set forth in SEQ ID NO: 375 (or a variant thereof); and a LCVR comprising the LCDR1, LCDR2 and LCDR3 of a LCVR that comprises the amino acid sequence set forth in SEQ ID NO: 380 (or a variant thereof); (6) a HCVR comprising the HCDR1, HCDR2 and HCDR3 of a HCVR that comprises the amino acid sequence set forth in SEQ ID NO: 385 (or a variant thereof); and a LCVR comprising the LCDR1, LCDR2 and LCDR3 of a LCVR that comprises the amino acid sequence set forth in SEQ ID NO: 390 (or a variant thereof); (7) a HCVR comprising the HCDR1, HCDR2 and HCDR3 of a HCVR that comprises the amino acid sequence set forth in SEQ ID NO: 395 (or a variant thereof); and a LCVR comprising the LCDR1, LCDR2 and LCDR3 of a LCVR that comprises the amino acid sequence set forth in SEQ ID NO: 400 (or a variant thereof); (8) a HCVR comprising the HCDR1, HCDR2 and HCDR3 of a HCVR that comprises the amino acid sequence set forth in SEQ ID NO: 405 (or a variant thereof); and a LCVR comprising the LCDR1, LCDR2 and LCDR3 of a LCVR that comprises the amino acid sequence set forth in SEQ ID NO: 410 (or a variant thereof); (9) a HCVR comprising the HCDR1, HCDR2 and HCDR3 of a HCVR that comprises the amino acid sequence set forth in SEQ ID NO: 415 (or a variant thereof); and a LCVR comprising the LCDR1, LCDR2 and LCDR3 of a LCVR that comprises the amino acid sequence set forth in SEQ ID NO: 420 (or a variant thereof); (10) a HCVR comprising the HCDR1, HCDR2 and HCDR3 of a HCVR that comprises the amino acid sequence set forth in SEQ ID NO: 425 (or a variant thereof); and a LCVR comprising the LCDR1, LCDR2 and LCDR3 of a LCVR that comprises the amino acid sequence set forth in SEQ ID NO: 430 (or a variant thereof); (11) a HCVR comprising the HCDR1, HCDR2 and HCDR3 of a HCVR that comprises the amino acid sequence set forth in SEQ ID NO: 435 (or a variant thereof); and a LCVR comprising the LCDR1, LCDR2 and LCDR3 of a LCVR that comprises the amino acid sequence set forth in SEQ ID NO: 440 (or a variant thereof); (12) a HCVR comprising the HCDR1, HCDR2 and HCDR3 of a HCVR that comprises the amino acid sequence set forth in SEQ ID NO: 445 (or a variant thereof); and a LCVR comprising the LCDR1, LCDR2 and LCDR3 of a LCVR that comprises the amino acid sequence set forth in SEQ ID NO: 450 (or a variant thereof); (13) a HCVR comprising the HCDR1, HCDR2 and HCDR3 of a HCVR that comprises the amino acid sequence set forth in SEQ ID NO: 455 (or a variant thereof); and a LCVR comprising the LCDR1, LCDR2 and LCDR3 of a LCVR that comprises the amino acid sequence set forth in SEQ ID NO: 460 (or a variant thereof); (14) a HCVR comprising the HCDR1, HCDR2 and HCDR3 of a HCVR that comprises the amino acid sequence set forth in SEQ ID NO: 465 (or a variant thereof); and a LCVR comprising the LCDR1, LCDR2 and LCDR3 of a LCVR that comprises the amino acid sequence set forth in SEQ ID NO: 470 (or a variant thereof); (15) a HCVR comprising the HCDR1, HCDR2 and HCDR3 of a HCVR that comprises the amino acid sequence set forth in SEQ ID NO: 475 (or a variant thereof); and a LCVR comprising the LCDR1, LCDR2 and LCDR3 of a LCVR that comprises the amino acid sequence set forth in SEQ ID NO: 480 (or a variant thereof); (16) a HCVR comprising the HCDR1, HCDR2 and HCDR3 of a HCVR that comprises the amino acid sequence set forth in SEQ ID NO: 485 (or a variant thereof); and a LCVR comprising the LCDR1, LCDR2 and LCDR3 of a LCVR that comprises the amino acid sequence set forth in SEQ ID NO: 490 (or a variant thereof); (17) a HCVR comprising the HCDR1, HCDR2 and HCDR3 of a HCVR that comprises the amino acid sequence set forth in SEQ ID NO: 495 (or a variant thereof); and a LCVR comprising the LCDR1, LCDR2 and LCDR3 of a LCVR that comprises the amino acid sequence set forth in SEQ ID NO: 500 (or a variant thereof); (18) a HCVR comprising the HCDR1, HCDR2 and HCDR3 of a HCVR that comprises the amino acid sequence set forth in SEQ ID NO: 505 (or a variant thereof); and a LCVR comprising the LCDR1, LCDR2 and LCDR3 of a LCVR that comprises the amino acid sequence set forth in SEQ ID NO: 510 (or a variant thereof); (19) a HCVR comprising the HCDR1, HCDR2 and HCDR3 of a HCVR that comprises the amino acid sequence set forth in SEQ ID NO: 515 (or a variant thereof); and a LCVR comprising the LCDR1, LCDR2 and LCDR3 of a LCVR that comprises the amino acid sequence set forth in SEQ ID NO: 520 (or a variant thereof); (20) a HCVR comprising the HCDR1, HCDR2 and HCDR3 of a HCVR that comprises the amino acid sequence set forth in SEQ ID NO: 525 (or a variant thereof); and a LCVR comprising the LCDR1, LCDR2 and LCDR3 of a LCVR that comprises the amino acid sequence set forth in SEQ ID NO: 530 (or a variant thereof); (21) a HCVR comprising the HCDR1, HCDR2 and HCDR3 of a HCVR that comprises the amino acid sequence set forth in SEQ ID NO: 535 (or a variant thereof); and a LCVR comprising the LCDR1, LCDR2 and LCDR3 of a LCVR that comprises the amino acid sequence set forth in SEQ ID NO: 540 (or a variant thereof); (22) a HCVR comprising the HCDR1, HCDR2 and HCDR3 of a HCVR that comprises the amino acid sequence set forth in SEQ ID NO: 545 (or a variant thereof); and a LCVR comprising the LCDR1, LCDR2 and LCDR3 of a LCVR that comprises the amino acid sequence set forth in SEQ ID NO: 550 (or a variant thereof); (23) a HCVR comprising the HCDR1, HCDR2 and HCDR3 of a HCVR that comprises the amino acid sequence set forth in SEQ ID NO: 555 (or a variant thereof); and a LCVR comprising the LCDR1, LCDR2 and LCDR3 of a LCVR that comprises the amino acid sequence set forth in SEQ ID NO: 560 (or a variant thereof); (24) a HCVR comprising the HCDR1, HCDR2 and HCDR3 of a HCVR that comprises the amino acid sequence set forth in SEQ ID NO: 565 (or a variant thereof); and a LCVR comprising the LCDR1, LCDR2 and LCDR3 of a LCVR that comprises the amino acid sequence set forth in SEQ ID NO: 570 (or a variant thereof); (25) a HCVR comprising the HCDR1, HCDR2 and HCDR3 of a HCVR that comprises the amino acid sequence set forth in SEQ ID NO: 575 (or a variant thereof); and a LCVR comprising the LCDR1, LCDR2 and LCDR3 of a LCVR that comprises the amino acid sequence set forth in SEQ ID NO: 580 (or a variant thereof); (26) a HCVR comprising the HCDR1, HCDR2 and HCDR3 of a HCVR that comprises the amino acid sequence set forth in SEQ ID NO: 585 (or a variant thereof); and a LCVR comprising the LCDR1, LCDR2 and LCDR3 of a LCVR that comprises the amino acid sequence set forth in SEQ ID NO: 590 (or a variant thereof); (27) a HCVR comprising the HCDR1, HCDR2 and HCDR3 of a HCVR that comprises the amino acid sequence set forth in SEQ ID NO: 595 (or a variant thereof); and a LCVR comprising the LCDR1, LCDR2 and LCDR3 of a LCVR that comprises the amino acid sequence set forth in SEQ ID NO: 600 (or a variant thereof); (28) a HCVR comprising the HCDR1, HCDR2 and HCDR3 of a HCVR that comprises the amino acid sequence set forth in SEQ ID NO: 605 (or a variant thereof); and a LCVR comprising the LCDR1, LCDR2 and LCDR3 of a LCVR that comprises the amino acid sequence set forth in SEQ ID NO: 610 (or a variant thereof); (29) a HCVR comprising the HCDR1, HCDR2 and HCDR3 of a HCVR that comprises the amino acid sequence set forth in SEQ ID NO: 615 (or a variant thereof); and a LCVR comprising the LCDR1, LCDR2 and LCDR3 of a LCVR that comprises the amino acid sequence set forth in SEQ ID NO: 620 (or a variant thereof); (30) a HCVR comprising the HCDR1, HCDR2 and HCDR3 of a HCVR that comprises the amino acid sequence set forth in SEQ ID NO: 625 (or a variant thereof); and a LCVR comprising the LCDR1, LCDR2 and LCDR3 of a LCVR that comprises the amino acid sequence set forth in SEQ ID NO: 630 (or a variant thereof); (31) a HCVR comprising the HCDR1, HCDR2 and HCDR3 of a HCVR that comprises the amino acid sequence set forth in SEQ ID NO: 635 (or a variant thereof); and a LCVR comprising the LCDR1, LCDR2 and LCDR3 of a LCVR that comprises the amino acid sequence set forth in SEQ ID NO: 640 (or a variant thereof); or (32) a HCVR comprising the HCDR1, HCDR2 and HCDR3 of a HCVR that comprises the amino acid sequence set forth in SEQ ID NO: 645 (or a variant thereof); and a LCVR comprising the LCDR1, LCDR2 and LCDR3 of a LCVR that comprises the amino acid sequence set forth in SEQ ID NO: 650 (or a variant thereof). A variant refers to a polypeptide comprising an amino acid sequence that is at least about 70-99.9% (e.g., 70, 72, 74, 75, 76, 79, 80, 81, 82, 83, 84, 85, 86, 87, 88, 89, 90, 91, 92, 93, 94, 95, 96, 97, 98, 99, 99.5, 99.9%) identical or similar to a referenced amino acid sequence that is set forth herein.

[0562] In another example, the anti-TfR scFv can comprise: (a) a HCVR that comprises: an HCDR1 comprising the amino acid sequence set forth in SEQ ID NO: 336 (or a variant thereof), an HCDR2 comprising the amino acid sequence set forth in SEQ ID NO: 337 (or a variant thereof), and an HCDR3 comprising the amino acid sequence set forth in SEQ ID NO: 338 (or a variant thereof); and a LCVR that comprises: an LCDR1 comprising the amino acid sequence set forth in SEQ ID NO: 341 (or a variant thereof), an LCDR2 comprising the amino acid sequence set forth in SEQ ID NO: 342 (or a variant thereof), and an LCDR3 comprising the amino acid sequence set forth in SEQ ID NO: 343 (or a variant thereof); (b) a HCVR that comprises: an HCDR1 comprising the amino acid sequence set forth in SEQ ID NO: 346 (or a variant thereof), an HCDR2 comprising the amino acid sequence set forth in SEQ ID NO: 347 (or a variant thereof), and an HCDR3 comprising the amino acid sequence set forth in SEQ ID NO: 348 (or a variant thereof); and a LCVR that comprises: an LCDR1 comprising the amino acid sequence set forth in SEQ ID NO: 351 (or a variant thereof), an LCDR2 comprising the amino acid sequence set forth in SEQ ID NO: 352 (or a variant thereof), and an LCDR3 comprising the amino acid sequence set forth in SEQ ID NO: 353 (or a variant thereof); (c) a HCVR that comprises: an HCDR1 comprising the amino acid sequence set forth in SEQ ID NO: 356 (or a variant thereof), an HCDR2 comprising the amino acid sequence set forth in SEQ ID NO: 357 (or a variant thereof), and an HCDR3 comprising the amino acid sequence set forth in SEQ ID NO: 358 (or a variant thereof); and a LCVR that comprises: an LCDR1 comprising the amino acid sequence set forth in SEQ ID NO: 361 (or a variant thereof), an LCDR2 comprising the amino acid sequence set forth in SEQ ID NO: 362 (or a variant thereof), and an LCDR3 comprising the amino acid sequence set forth in SEQ ID NO: 363 (or a variant thereof); (d) a HCVR that comprises: an HCDR1 comprising the amino acid sequence set forth in SEQ ID NO: 366 (or a variant thereof), an HCDR2 comprising the amino acid sequence set forth in SEQ ID NO: 367 (or a variant thereof), and an HCDR3 comprising the amino acid sequence set forth in SEQ ID NO: 368 (or a variant thereof); and a LCVR that comprises: an LCDR1 comprising the amino acid sequence set forth in SEQ ID NO: 371 (or a variant thereof), an LCDR2 comprising the amino acid sequence set forth in SEQ ID NO: 372 (or a variant thereof), and an LCDR3 comprising the amino acid sequence set forth in SEQ ID NO: 373 (or a variant thereof); (e) a HCVR that comprises: an HCDR1 comprising the amino acid sequence set forth in SEQ ID NO: 376 (or a variant thereof), an HCDR2 comprising the amino acid sequence set forth in SEQ ID NO: 377 (or a variant thereof), and an HCDR3 comprising the amino acid sequence set forth in SEQ ID NO: 378 (or a variant thereof); and a LCVR that comprises: an LCDR1 comprising the amino acid sequence set forth in SEQ ID NO: 381 (or a variant thereof), an LCDR2 comprising the amino acid sequence set forth in SEQ ID NO: 382 (or a variant thereof), and an LCDR3 comprising the amino acid sequence set forth in SEQ ID NO: 383 (or a variant thereof); (f) a HCVR that comprises: an HCDR1 comprising the amino acid sequence set forth in SEQ ID NO: 386 (or a variant thereof), an HCDR2 comprising the amino acid sequence set forth in SEQ ID NO: 387 (or a variant thereof), and an HCDR3 comprising the amino acid sequence set forth in SEQ ID NO: 388 (or a variant thereof); and a LCVR that comprises: an LCDR1 comprising the amino acid sequence set forth in SEQ ID NO: 391 (or a variant thereof), an LCDR2 comprising the amino acid sequence set forth in SEQ ID NO: 392 (or a variant thereof), and an LCDR3 comprising the amino acid sequence set forth in SEQ ID NO: 393 (or a variant thereof); (g) a HCVR that comprises: an HCDR1 comprising the amino acid sequence set forth in SEQ ID NO: 396 (or a variant thereof), an HCDR2 comprising the amino acid sequence set forth in SEQ ID NO: 397 (or a variant thereof), and an HCDR3 comprising the amino acid sequence set forth in SEQ ID NO: 398 (or a variant thereof); and a LCVR that comprises: an LCDR1 comprising the amino acid sequence set forth in SEQ ID NO: 401 (or a variant thereof), an LCDR2 comprising the amino acid sequence set forth in SEQ ID NO: 402 (or a variant thereof), and an LCDR3 comprising the amino acid sequence set forth in SEQ ID NO: 403 (or a variant thereof); (h) a HCVR that comprises: an HCDR1 comprising the amino acid sequence set forth in SEQ ID NO: 406 (or a variant thereof), an HCDR2 comprising the amino acid sequence set forth in SEQ ID NO: 407 (or a variant thereof), and an HCDR3 comprising the amino acid sequence set forth in SEQ ID NO: 408 (or a variant thereof); and a LCVR that comprises: an LCDR1 comprising the amino acid sequence set forth in SEQ ID NO: 411 (or a variant thereof), an LCDR2 comprising the amino acid sequence set forth in SEQ ID NO: 412 (or a variant thereof), and an LCDR3 comprising the amino acid sequence set forth in SEQ ID NO: 413 (or a variant thereof); (i) a HCVR that comprises: an HCDR1 comprising the amino acid sequence set forth in SEQ ID NO: 416 (or a variant thereof), an HCDR2 comprising the amino acid sequence set forth in SEQ ID NO: 417 (or a variant thereof), and an HCDR3 comprising the amino acid sequence set forth in SEQ ID NO: 418 (or a variant thereof); and a LCVR that comprises: an LCDR1 comprising the amino acid sequence set forth in SEQ ID NO: 421 (or a variant thereof), an LCDR2 comprising the amino acid sequence set forth in SEQ ID NO: 422 (or a variant thereof), and an LCDR3 comprising the amino acid sequence set forth in SEQ ID NO: 423 (or a variant thereof); (j) a HCVR that comprises: an HCDR1 comprising the amino acid sequence set forth in SEQ ID NO: 426 (or a variant thereof), an HCDR2 comprising the amino acid sequence set forth in SEQ ID NO: 427 (or a variant thereof), and an HCDR3 comprising the amino acid sequence set forth in SEQ ID NO: 428 (or a variant thereof); and a LCVR that comprises: an LCDR1 comprising the amino acid sequence set forth in SEQ ID NO: 431 (or a variant thereof), an LCDR2 comprising the amino acid sequence set forth in SEQ ID NO: 432 (or a variant thereof), and an LCDR3 comprising the amino acid sequence set forth in SEQ ID NO: 433 (or a variant thereof); (k) a HCVR that comprises: an HCDR1 comprising the amino acid sequence set forth in SEQ ID NO: 436 (or a variant thereof), an HCDR2 comprising the amino acid sequence set forth in SEQ ID NO: 437 (or a variant thereof), and an HCDR3 comprising the amino acid sequence set forth in SEQ ID NO: 438 (or a variant thereof); and a LCVR that comprises: an LCDR1 comprising the amino acid sequence set forth in SEQ ID NO: 441 (or a variant thereof), an LCDR2 comprising the amino acid sequence set forth in SEQ ID NO: 442 (or a variant thereof), and an LCDR3 comprising the amino acid sequence set forth in SEQ ID NO: 443 (or a variant thereof); (1) a HCVR that comprises: an HCDR1 comprising the amino acid sequence set forth in SEQ ID NO: 446 (or a variant thereof), an HCDR2 comprising the amino acid sequence set forth in SEQ ID NO: 447 (or a variant thereof), and an HCDR3 comprising the amino acid sequence set forth in SEQ ID NO: 448 (or a variant thereof); and a LCVR that comprises: an LCDR1 comprising the amino acid sequence set forth in SEQ ID NO: 451 (or a variant thereof), an LCDR2 comprising the amino acid sequence set forth in SEQ ID NO: 452 (or a variant thereof), and an LCDR3 comprising the amino acid sequence set forth in SEQ ID NO: 453 (or a variant thereof); (m) a HCVR that comprises: an HCDR1 comprising the amino acid sequence set forth in SEQ ID NO: 456 (or a variant thereof), an HCDR2 comprising the amino acid sequence set forth in SEQ ID NO: 457 (or a variant thereof), and an HCDR3 comprising the amino acid sequence set forth in SEQ ID NO: 458 (or a variant thereof); and a LCVR that comprises: an LCDR1 comprising the amino acid sequence set forth in SEQ ID NO: 461 (or a variant thereof), an LCDR2 comprising the amino acid sequence set forth in SEQ ID NO: 462 (or a variant thereof), and an LCDR3 comprising the amino acid sequence set forth in SEQ ID NO: 463 (or a variant thereof); (n) a HCVR that comprises: an HCDR1 comprising the amino acid sequence set forth in SEQ ID NO: 466 (or a variant thereof), an HCDR2 comprising the amino acid sequence set forth in SEQ ID NO: 467 (or a variant thereof), and an HCDR3 comprising the amino acid sequence set forth in SEQ ID NO: 468 (or a variant thereof); and a LCVR that comprises: an LCDR1 comprising the amino acid sequence set forth in SEQ ID NO: 471 (or a variant thereof), an LCDR2 comprising the amino acid sequence set forth in SEQ ID NO: 472 (or a variant thereof), and an LCDR3 comprising the amino acid sequence set forth in SEQ ID NO: 473 (or a variant thereof); (o) a HCVR that comprises: an HCDR1 comprising the amino acid sequence set forth in SEQ ID NO: 476 (or a variant thereof), an HCDR2 comprising the amino acid sequence set forth in SEQ ID NO: 477 (or a variant thereof), and an HCDR3 comprising the amino acid sequence set forth in SEQ ID NO: 478 (or a variant thereof); and a LCVR that comprises: an LCDR1 comprising the amino acid sequence set forth in SEQ ID NO: 481 (or a variant thereof), an LCDR2 comprising the amino acid sequence set forth in SEQ ID NO: 482 (or a variant thereof), and an LCDR3 comprising the amino acid sequence set forth in SEQ ID NO: 483 (or a variant thereof); (p) a HCVR that comprises: an HCDR1 comprising the amino acid sequence set forth in SEQ ID NO: 486 (or a variant thereof), an HCDR2 comprising the amino acid sequence set forth in SEQ ID NO: 487 (or a variant thereof), and an HCDR3 comprising the amino acid sequence set forth in SEQ ID NO: 488 (or a variant thereof); and a LCVR that comprises: an LCDR1 comprising the amino acid sequence set forth in SEQ ID NO: 491 (or a variant thereof), an LCDR2 comprising the amino acid sequence set forth in SEQ ID NO: 492 (or a variant thereof), and an LCDR3 comprising the amino acid sequence set forth in SEQ ID NO: 493 (or a variant thereof); (q) a HCVR that comprises: an HCDR1 comprising the amino acid sequence set forth in SEQ ID NO: 496 (or a variant thereof), an HCDR2 comprising the amino acid sequence set forth in SEQ ID NO: 497 (or a variant thereof), and an HCDR3 comprising the amino acid sequence set forth in SEQ ID NO: 498 (or a variant thereof); and a LCVR that comprises: an LCDR1 comprising the amino acid sequence set forth in SEQ ID NO: 501 (or a variant thereof), an LCDR2 comprising the amino acid sequence set forth in SEQ ID NO: 502 (or a variant thereof), and an LCDR3 comprising the amino acid sequence set forth in SEQ ID NO: 503 (or a variant thereof); (r) a HCVR that comprises: an HCDR1 comprising the amino acid sequence set forth in SEQ ID NO: 506 (or a variant thereof), an HCDR2 comprising the amino acid sequence set forth in SEQ ID NO: 507 (or a variant thereof), and an HCDR3 comprising the amino acid sequence set forth in SEQ ID NO: 508 (or a variant thereof); and a LCVR that comprises: an LCDR1 comprising the amino acid sequence set forth in SEQ ID NO: 511 (or a variant thereof), an LCDR2 comprising the amino acid sequence set forth in SEQ ID NO: 512 (or a variant thereof), and an LCDR3 comprising the amino acid sequence set forth in SEQ ID NO: 513 (or a variant thereof); (s) a HCVR that comprises: an HCDR1 comprising the amino acid sequence set forth in SEQ ID NO: 516 (or a variant thereof), an HCDR2 comprising the amino acid sequence set forth in SEQ ID NO: 517 (or a variant thereof), and an HCDR3 comprising the amino acid sequence set forth in SEQ ID NO: 518 (or a variant thereof); and a LCVR that comprises: an LCDR1 comprising the amino acid sequence set forth in SEQ ID NO: 521 (or a variant thereof), an LCDR2 comprising the amino acid sequence set forth in SEQ ID NO: 522 (or a variant thereof), and an LCDR3 comprising the amino acid sequence set forth in SEQ ID NO: 523 (or a variant thereof); (t) a HCVR that comprises: an HCDR1 comprising the amino acid sequence set forth in SEQ ID NO: 526 (or a variant thereof), an HCDR2 comprising the amino acid sequence set forth in SEQ ID NO: 527 (or a variant thereof), and an HCDR3 comprising the amino acid sequence set forth in SEQ ID NO: 528 (or a variant thereof); and a LCVR that comprises: an LCDR1 comprising the amino acid sequence set forth in SEQ ID NO: 531 (or a variant thereof), an LCDR2 comprising the amino acid sequence set forth in SEQ ID NO: 532 (or a variant thereof), and an LCDR3 comprising the amino acid sequence set forth in SEQ ID NO: 533 (or a variant thereof); (u) a HCVR that comprises: an HCDR1 comprising the amino acid sequence set forth in SEQ ID NO: 536 (or a variant thereof), an HCDR2 comprising the amino acid sequence set forth in SEQ ID NO: 537 (or a variant thereof), and an HCDR3 comprising the amino acid sequence set forth in SEQ ID NO: 538 (or a variant thereof); and a LCVR that comprises: an LCDR1 comprising the amino acid sequence set forth in SEQ ID NO: 541 (or a variant thereof), an LCDR2 comprising the amino acid sequence set forth in SEQ ID NO: 542 (or a variant thereof), and an LCDR3 comprising the amino acid sequence set forth in SEQ ID NO: 543 (or a variant thereof); (v) a HCVR that comprises: an HCDR1 comprising the amino acid sequence set forth in SEQ ID NO: 546 (or a variant thereof), an HCDR2 comprising the amino acid sequence set forth in SEQ ID NO: 547 (or a variant thereof), and an HCDR3 comprising the amino acid sequence set forth in SEQ ID NO: 548 (or a variant thereof); and a LCVR that comprises: an LCDR1 comprising the amino acid sequence set forth in SEQ ID NO: 551 (or a variant thereof), an LCDR2 comprising the amino acid sequence set forth in SEQ ID NO: 552 (or a variant thereof), and an LCDR3 comprising the amino acid sequence set forth in SEQ ID NO: 553 (or a variant thereof); (w) a HCVR that comprises: an HCDR1 comprising the amino acid sequence set forth in SEQ ID NO: 556 (or a variant thereof), an HCDR2 comprising the amino acid sequence set forth in SEQ ID NO: 557 (or a variant thereof), and an HCDR3 comprising the amino acid sequence set forth in SEQ ID NO: 558 (or a variant thereof); and a LCVR that comprises: an LCDR1 comprising the amino acid sequence set forth in SEQ ID NO: 561 (or a variant thereof), an LCDR2 comprising the amino acid sequence set forth in SEQ ID NO: 562 (or a variant thereof), and an LCDR3 comprising the amino acid sequence set forth in SEQ ID NO: 563 (or a variant thereof); (x) a HCVR that comprises: an HCDR1 comprising the amino acid sequence set forth in SEQ ID NO: 566 (or a variant thereof), an HCDR2 comprising the amino acid sequence set forth in SEQ ID NO: 567 (or a variant thereof), and an HCDR3 comprising the amino acid sequence set forth in SEQ ID NO: 568 (or a variant thereof); and a LCVR that comprises: an LCDR1 comprising the amino acid sequence set forth in SEQ ID NO: 571 (or a variant thereof), an LCDR2 comprising the amino acid sequence set forth in SEQ ID NO: 572 (or a variant thereof), and an LCDR3 comprising the amino acid sequence set forth in SEQ ID NO: 573 (or a variant thereof); (y) a HCVR that comprises: an HCDR1 comprising the amino acid sequence set forth in SEQ ID NO: 576 (or a variant thereof), an HCDR2 comprising the amino acid sequence set forth in SEQ ID NO: 577 (or a variant thereof), and an HCDR3 comprising the amino acid sequence set forth in SEQ ID NO: 578 (or a variant thereof); and a LCVR that comprises: an LCDR1 comprising the amino acid sequence set forth in SEQ ID NO: 581 (or a variant thereof), an LCDR2 comprising the amino acid sequence set forth in SEQ ID NO: 582 (or a variant thereof), and an LCDR3 comprising the amino acid sequence set forth in SEQ ID NO: 583 (or a variant thereof); (z) a HCVR that comprises: an HCDR1 comprising the amino acid sequence set forth in SEQ ID NO: 586 (or a variant thereof), an HCDR2 comprising the amino acid sequence set forth in SEQ ID NO: 587 (or a variant thereof), and an HCDR3 comprising the amino acid sequence set forth in SEQ ID NO: 588 (or a variant thereof); and a LCVR that comprises: an LCDR1 comprising the amino acid sequence set forth in SEQ ID NO: 591 (or a variant thereof), an LCDR2 comprising the amino acid sequence set forth in SEQ ID NO: 592 (or a variant thereof), and an LCDR3 comprising the amino acid sequence set forth in SEQ ID NO: 593 (or a variant thereof); (aa) a HCVR that comprises: an HCDR1 comprising the amino acid sequence set forth in SEQ ID NO: 596 (or a variant thereof), an HCDR2 comprising the amino acid sequence set forth in SEQ ID NO: 597 (or a variant thereof), and an HCDR3 comprising the amino acid sequence set forth in SEQ ID NO: 598 (or a variant thereof); and a LCVR that comprises: an LCDR1 comprising the amino acid sequence set forth in SEQ ID NO: 601 (or a variant thereof), an LCDR2 comprising the amino acid sequence set forth in SEQ ID NO: 602 (or a variant thereof), and an LCDR3 comprising the amino acid sequence set forth in SEQ ID NO: 603 (or a variant thereof); (ab) a HCVR that comprises: an HCDR1 comprising the amino acid sequence set forth in SEQ ID NO: 606 (or a variant thereof), an HCDR2 comprising the amino acid sequence set forth in SEQ ID NO: 607 (or a variant thereof), and an HCDR3 comprising the amino acid sequence set forth in SEQ ID NO: 608 (or a variant thereof); and a LCVR that comprises: an LCDR1 comprising the amino acid sequence set forth in SEQ ID NO: 611 (or a variant thereof), an LCDR2 comprising the amino acid sequence set forth in SEQ ID NO: 612 (or a variant thereof), and an LCDR3 comprising the amino acid sequence set forth in SEQ ID NO: 613 (or a variant thereof); (ac) a HCVR that comprises: an HCDR1 comprising the amino acid sequence set forth in SEQ ID NO: 616 (or a variant thereof), an HCDR2 comprising the amino acid sequence set forth in SEQ ID NO: 617 (or a variant thereof), and an HCDR3 comprising the amino acid sequence set forth in SEQ ID NO: 618 (or a variant thereof); and a LCVR that comprises: an LCDR1 comprising the amino acid sequence set forth in SEQ ID NO: 621 (or a variant thereof), an LCDR2 comprising the amino acid sequence set forth in SEQ ID NO: 622 (or a variant thereof), and an LCDR3 comprising the amino acid sequence set forth in SEQ ID NO: 623 (or a variant thereof); (ad) a HCVR that comprises: an HCDR1 comprising the amino acid sequence set forth in SEQ ID NO: 626 (or a variant thereof), an HCDR2 comprising the amino acid sequence set forth in SEQ ID NO: 627 (or a variant thereof), and an HCDR3 comprising the amino acid sequence set forth in SEQ ID NO: 628 (or a variant thereof); and a LCVR that comprises: an LCDR1 comprising the amino acid sequence set forth in SEQ ID NO: 631 (or a variant thereof), an LCDR2 comprising the amino acid sequence set forth in SEQ ID NO: 632 (or a variant thereof), and an LCDR3 comprising the amino acid sequence set forth in SEQ ID NO: 633 (or a variant thereof); (ae) a HCVR that comprises: an HCDR1 comprising the amino acid sequence set forth in SEQ ID NO: 636 (or a variant thereof), an HCDR2 comprising the amino acid sequence set forth in SEQ ID NO: 637 (or a variant thereof), and an HCDR3 comprising the amino acid sequence set forth in SEQ ID NO: 638 (or a variant thereof); and a LCVR that comprises: an LCDR1 comprising the amino acid sequence set forth in SEQ ID NO: 641 (or a variant thereof), an LCDR2 comprising the amino acid sequence set forth in SEQ ID NO: 642 (or a variant thereof), and an LCDR3 comprising the amino acid sequence set forth in SEQ ID NO: 643 (or a variant thereof); and/or (af) a HCVR that comprises: an HCDR1 comprising the amino acid sequence set forth in SEQ ID NO: 646 (or a variant thereof), an HCDR2 comprising the amino acid sequence set forth in SEQ ID NO: 647 (or a variant thereof), and an HCDR3 comprising the amino acid sequence set forth in SEQ ID NO: 648 (or a variant thereof); and a LCVR that comprises: an LCDR1 comprising the amino acid sequence set forth in SEQ ID NO: 651 (or a variant thereof), an LCDR2 comprising the amino acid sequence set forth in SEQ ID NO: 652 (or a variant thereof), and an LCDR3 comprising the amino acid sequence set forth in SEQ ID NO: 653 (or a variant thereof). A variant refers to a polypeptide comprising an amino acid sequence that is at least about 70-99.9% (e.g., 70, 72, 74, 75, 76, 79, 80, 81, 82, 83, 84, 85, 86, 87, 88, 89, 90, 91, 92, 93, 94, 95, 96, 97, 98, 99, 99.5, 99.9%) identical or similar to a referenced amino acid sequence that is set forth herein.

[0563] In another example, the anti-TfR scFv can comprise: (i) a HCVR that comprises the amino acid sequence set forth in SEQ ID NO: 335 (or a variant thereof); and a LCVR that comprises the amino acid sequence set forth in SEQ ID NO: 340 (or a variant thereof); (ii) a HCVR that comprises the amino acid sequence set forth in SEQ ID NO: 345 (or a variant thereof); and a LCVR that comprises the amino acid sequence set forth in SEQ ID NO: 350 (or a variant thereof); (iii) a HCVR that comprises the amino acid sequence set forth in SEQ ID NO: 355 (or a variant thereof); and a LCVR that comprises the amino acid sequence set forth in SEQ ID NO: 360 (or a variant thereof); (iv) a HCVR that comprises the amino acid sequence set forth in SEQ ID NO: 365 (or a variant thereof); and a LCVR that comprises the amino acid sequence set forth in SEQ ID NO: 370 (or a variant thereof); (v) a HCVR that comprises the amino acid sequence set forth in SEQ ID NO: 375 (or a variant thereof); and a LCVR that comprises the amino acid sequence set forth in SEQ ID NO: 380 (or a variant thereof); (vi) a HCVR that comprises the amino acid sequence set forth in SEQ ID NO: 385 (or a variant thereof); and a LCVR that comprises the amino acid sequence set forth in SEQ ID NO: 390 (or a variant thereof); (vii) a HCVR that comprises the amino acid sequence set forth in SEQ ID NO: 395 (or a variant thereof); and a LCVR that comprises the amino acid sequence set forth in SEQ ID NO: 400 (or a variant thereof); (viii) a HCVR that comprises the amino acid sequence set forth in SEQ ID NO: 405 (or a variant thereof); and a LCVR that comprises the amino acid sequence set forth in SEQ ID NO: 410 (or a variant thereof); (ix) a HCVR that comprises the amino acid sequence set forth in SEQ ID NO: 415 (or a variant thereof); and a LCVR that comprises the amino acid sequence set forth in SEQ ID NO: 420 (or a variant thereof); (x) a HCVR that comprises the amino acid sequence set forth in SEQ ID NO: 425 (or a variant thereof); and a LCVR that comprises the amino acid sequence set forth in SEQ ID NO: 430 (or a variant thereof); (xi) a HCVR that comprises the amino acid sequence set forth in SEQ ID NO: 435 (or a variant thereof); and a LCVR that comprises the amino acid sequence set forth in SEQ ID NO: 440 (or a variant thereof); (xii) a HCVR that comprises the amino acid sequence set forth in SEQ ID NO: 445 (or a variant thereof); and a LCVR that comprises the amino acid sequence set forth in SEQ ID NO: 450 (or a variant thereof); (xiii) a HCVR that comprises the amino acid sequence set forth in SEQ ID NO: 455 (or a variant thereof); and a LCVR that comprises the amino acid sequence set forth in SEQ ID NO: 460 (or a variant thereof); (xiv) a HCVR that comprises the amino acid sequence set forth in SEQ ID NO: 465 (or a variant thereof); and a LCVR that comprises the amino acid sequence set forth in SEQ ID NO: 470 (or a variant thereof); (xv) a HCVR that comprises the amino acid sequence set forth in SEQ ID NO: 475 (or a variant thereof); and a LCVR that comprises the amino acid sequence set forth in SEQ ID NO: 480 (or a variant thereof); (xvi) a HCVR that comprises the amino acid sequence set forth in SEQ ID NO: 485 (or a variant thereof); and a LCVR that comprises the amino acid sequence set forth in SEQ ID NO: 490 (or a variant thereof); (xvii) a HCVR that comprises the amino acid sequence set forth in SEQ ID NO: 495 (or a variant thereof); and a LCVR that comprises the amino acid sequence set forth in SEQ ID NO: 500 (or a variant thereof); (xviii) a HCVR that comprises the amino acid sequence set forth in SEQ ID NO: 505 (or a variant thereof); and a LCVR that comprises the amino acid sequence set forth in SEQ ID NO: 510 (or a variant thereof); (xix) a HCVR that comprises the amino acid sequence set forth in SEQ ID NO: 515 (or a variant thereof); and a LCVR that comprises the amino acid sequence set forth in SEQ ID NO: 520 (or a variant thereof); (xx) a HCVR that comprises the amino acid sequence set forth in SEQ ID NO: 525 (or a variant thereof); and a LCVR that comprises the amino acid sequence set forth in SEQ ID NO: 530 (or a variant thereof); (xxi) a HCVR that comprises the amino acid sequence set forth in SEQ ID NO: 535 (or a variant thereof); and a LCVR that comprises the amino acid sequence set forth in SEQ ID NO: 540 (or a variant thereof); (xxii) a HCVR that comprises the amino acid sequence set forth in SEQ ID NO: 545 (or a variant thereof); and a LCVR that comprises the amino acid sequence set forth in SEQ ID NO: 550 (or a variant thereof); (xxiii) a HCVR that comprises the amino acid sequence set forth in SEQ ID NO: 555 (or a variant thereof); and a LCVR that comprises the amino acid sequence set forth in SEQ ID NO: 560 (or a variant thereof); (xxiv) a HCVR that comprises the amino acid sequence set forth in SEQ ID NO: 565 (or a variant thereof); and a LCVR that comprises the amino acid sequence set forth in SEQ ID NO: 570 (or a variant thereof); (xxv) a HCVR that comprises the amino acid sequence set forth in SEQ ID NO: 575 (or a variant thereof); and a LCVR that comprises the amino acid sequence set forth in SEQ ID NO: 580 (or a variant thereof); (xxvi) a HCVR that comprises the amino acid sequence set forth in SEQ ID NO: 585 (or a variant thereof); and a LCVR that comprises the amino acid sequence set forth in SEQ ID NO: 590 (or a variant thereof); (xxvii) a HCVR that comprises the amino acid sequence set forth in SEQ ID NO: 595 (or a variant thereof); and a LCVR that comprises the amino acid sequence set forth in SEQ ID NO: 600 (or a variant thereof); (xxviii) a HCVR that comprises the amino acid sequence set forth in SEQ ID NO: 605 (or a variant thereof); and a LCVR that comprises the amino acid sequence set forth in SEQ ID NO: 610 (or a variant thereof); (xxix) a HCVR that comprises the amino acid sequence set forth in SEQ ID NO: 615 (or a variant thereof); and a LCVR that comprises the amino acid sequence set forth in SEQ ID NO: 620 (or a variant thereof); (xxx) a HCVR that comprises the amino acid sequence set forth in SEQ ID NO: 625 (or a variant thereof); and a LCVR that comprises the amino acid sequence set forth in SEQ ID NO: 630 (or a variant thereof); (xxxi) a HCVR that comprises the amino acid sequence set forth in SEQ ID NO: 635 (or a variant thereof); and a LCVR that comprises the amino acid sequence set forth in SEQ ID NO: 640 (or a variant thereof); and/or (xxxii) a HCVR that comprises the amino acid sequence set forth in SEQ ID NO: 645 (or a variant thereof); and a LCVR that comprises the amino acid sequence set forth in SEQ ID NO: 650 (or a variant thereof), optionally wherein the HCVR and LCVR are linked by a linker (e.g., that comprises an amino acid sequence, e.g., about 10 amino acids in length, for example, 1, 2, 3, 4, 5, 6, 7, 8, 8, or 10 repeats of Gly₄Ser (SEQ ID NO: 718). A variant refers to a polypeptide comprising an amino acid sequence that is at least about 70-99.9% (e.g., 70, 72, 74, 75, 76, 79, 80, 81, 82, 83, 84, 85, 86, 87, 88, 89, 90, 91, 92, 93, 94, 95, 96, 97, 98, 99, 99.5, 99.9%) identical or similar to a referenced amino acid sequence that is set forth herein.

[0564] Examples of polynucleotides encoding anti-TfR scFvs are provided in Table 3 and include: (1) a polynucleotide encoding a HCVR that comprises the nucleotide sequence set forth in SEQ ID NO: 334, and a LCVR that comprises the nucleotide sequence set forth in SEQ ID NO: 339; (2) a polynucleotide encoding a HCVR that comprises the nucleotide sequence set forth in SEQ ID NO: 344, and a LCVR that comprises the nucleotide sequence set forth in SEQ ID NO: 349; (3) a polynucleotide encoding a HCVR that comprises the nucleotide sequence set forth in SEQ ID NO: 354, and a LCVR that comprises the nucleotide sequence set forth in SEQ ID NO: 359; (4) a polynucleotide encoding a HCVR that comprises the nucleotide sequence set forth in SEQ ID NO: 364, and a LCVR that comprises the nucleotide sequence set forth in SEQ ID NO: 369; (5) a polynucleotide encoding a HCVR that comprises the nucleotide sequence set forth in SEQ ID NO: 374, and a LCVR that comprises the nucleotide sequence set forth in SEQ ID NO: 379; (6) a polynucleotide encoding a HCVR that comprises the nucleotide sequence set forth in SEQ ID NO: 384, and a LCVR that comprises the nucleotide sequence set forth in SEQ ID NO: 389; (7) a polynucleotide encoding a HCVR that comprises the nucleotide sequence set forth in SEQ ID NO: 394, and a LCVR that comprises the nucleotide sequence set forth in SEQ ID NO: 399; (8) a polynucleotide encoding a HCVR that comprises the nucleotide sequence set forth in SEQ ID NO: 404, and a LCVR that comprises the nucleotide sequence set forth in SEQ ID NO: 409; (9) a polynucleotide encoding a HCVR that comprises the nucleotide sequence set forth in SEQ ID NO: 414, and a LCVR that comprises the nucleotide sequence set forth in SEQ ID NO: 419; (10) a polynucleotide encoding a HCVR that comprises the nucleotide sequence set forth in SEQ ID NO: 424, and a LCVR that comprises the nucleotide sequence set forth in SEQ ID NO: 429; (11) a polynucleotide encoding a HCVR that comprises the nucleotide sequence set forth in SEQ ID NO: 434, and a LCVR that comprises the nucleotide sequence set forth in SEQ ID NO: 439; (12) a polynucleotide encoding a HCVR that comprises the nucleotide sequence set forth in SEQ ID NO: 444, and a LCVR that comprises the nucleotide sequence set forth in SEQ ID NO: 449; (13) a polynucleotide encoding a HCVR that comprises the nucleotide sequence set forth in SEQ ID NO: 454, and a LCVR that comprises the nucleotide sequence set forth in SEQ ID NO: 459; (14) a polynucleotide encoding a HCVR that comprises the nucleotide sequence set forth in SEQ ID NO: 464, and a LCVR that comprises the nucleotide sequence set forth in SEQ ID NO: 469; (15) a polynucleotide encoding a HCVR that comprises the nucleotide sequence set forth in SEQ ID NO: 474, and a LCVR that comprises the nucleotide sequence set forth in SEQ ID NO: 479; (16) a polynucleotide encoding a HCVR that comprises the nucleotide sequence set forth in SEQ ID NO: 484, and a LCVR that comprises the nucleotide sequence set forth in SEQ ID NO: 489; (17) a polynucleotide encoding a HCVR that comprises the nucleotide sequence set forth in SEQ ID NO: 494, and a LCVR that comprises the nucleotide sequence set forth in SEQ ID NO: 499; (18) a polynucleotide encoding a HCVR that comprises the nucleotide sequence set forth in SEQ ID NO: 504, and a LCVR that comprises the nucleotide sequence set forth in SEQ ID NO: 509; (19) a polynucleotide encoding a HCVR that comprises the nucleotide sequence set forth in SEQ ID NO: 514, and a LCVR that comprises the nucleotide sequence set forth in SEQ ID NO: 519; (20) a polynucleotide encoding a HCVR that comprises the nucleotide sequence set forth in SEQ ID NO: 524, and a LCVR that comprises the nucleotide sequence set forth in SEQ ID NO: 529; (21) a polynucleotide encoding a HCVR that comprises the nucleotide sequence set forth in SEQ ID NO: 534, and a LCVR that comprises the nucleotide sequence set forth in SEQ ID NO: 539; (22) a polynucleotide encoding a HCVR that comprises the nucleotide sequence set forth in SEQ ID NO: 544, and a LCVR that comprises the nucleotide sequence set forth in SEQ ID NO: 549; (23) a polynucleotide encoding a HCVR that comprises the nucleotide sequence set forth in SEQ ID NO: 554, and a LCVR that comprises the nucleotide sequence set forth in SEQ ID NO: 559; (24) a polynucleotide encoding a HCVR that comprises the nucleotide sequence set forth in SEQ ID NO: 564, and a LCVR that comprises the nucleotide sequence set forth in SEQ ID NO: 569; (25) a polynucleotide encoding a HCVR that comprises the nucleotide sequence set forth in SEQ ID NO: 574, and a LCVR that comprises the nucleotide sequence set forth in SEQ ID NO: 579; (26) a polynucleotide encoding a HCVR that comprises the nucleotide sequence set forth in SEQ ID NO: 584, and a LCVR that comprises the nucleotide sequence set forth in SEQ ID NO: 589; (27) a polynucleotide encoding a HCVR that comprises the nucleotide sequence set forth in SEQ ID NO: 594, and a LCVR that comprises the nucleotide sequence set forth in SEQ ID NO: 599; (28) a polynucleotide encoding a HCVR that comprises the nucleotide sequence set forth in SEQ ID NO: 604, and a LCVR that comprises the nucleotide sequence set forth in SEQ ID NO: 609; (29) a polynucleotide encoding a HCVR that comprises the nucleotide sequence set forth in SEQ ID NO: 614, and a LCVR that comprises the nucleotide sequence set forth in SEQ ID NO: 619; (30) a polynucleotide encoding a HCVR that comprises the nucleotide sequence set forth in SEQ ID NO: 624, and a LCVR that comprises the nucleotide sequence set forth in SEQ ID NO: 629; (31) a polynucleotide encoding a HCVR that comprises the nucleotide sequence set forth in SEQ ID NO: 634, and a LCVR that comprises the nucleotide sequence set forth in SEQ ID NO: 639; or (32) a polynucleotide encoding a HCVR that comprises the nucleotide sequence set forth in SEQ ID NO: 644, and a LCVR that comprises the nucleotide sequence set forth in SEQ ID NO: 649, wherein the HCVR and LCVR are in either order.

[0565] In an embodiment, an anti-hTfR scFv, in V_{L}-(Gly₄Ser)₃-V_{H} format (Gly₄Ser=SEQ ID NO: 718), comprises the amino acid sequence set forth in any one of SEQ ID NOS: 656-687. Also contemplated are such fusions that are in the format V_{H}-(Gly₄Ser)₃-V_{L} (Gly₄Ser=SEQ ID NO: 718).

[0566] In another example, the TfR-binding delivery domain can be a Fab fragment (e.g., that binds specifically to human transferrin receptor). Fab fragments typically contain one complete light chain, VL and constant light domain, e.g., kappa (e.g., RTVAAPSVFIFPPSDEQLKSGTASVVCLLNNFYPREAKVQWKVDNALQSGNSQESVTEQ DSKDSTYSLS STLTLSKADYEKHKVYACEVTHQGLSSPVTKSFNRGEC (SEQ ID NO: 719)) and the V_{H} and IgG1 CH1 portion (e.g., ASTKGPSVFPLAPSSKSTSGGTAALGCLVKDYFPEPVTVSWNSGALTSGVHTFPAVLQSS GLYSLSSVV TVPSSSLGTQTYICNVNHKPSNTKVDKKVEPKSCDKTH (SEQ ID NO: 720)) or IgG4 CH1 (e.g., ASTKGPSVFPLAPCSRSTSESTAALGCLVKDYFPEPVTVSWNSGALTSGVHTFPAVLQSS GLYSLSSVVTVPSSSLGTKTYTCNVDHKPSNTKVDKRVESKYGPPLLQGSG (SEQ ID NO: 792)) of one heavy chain. Fab fragment antibodies can be generated by papain digestion of whole IgG antibodies to remove the entire Fc fragment, including the hinge region. In one example, the Fab protein can comprise: (1) a heavy chain variable region (HCVR) that comprises the amino acid sequence set forth in SEQ ID NO: 335, or a heavy chain variable region that includes HCDR1, HCDR2 and HCDR3 of such a HCVR-linked to the CH1 domain—and a light chain variable region (LCVR) that comprises the amino acid sequence set forth in SEQ ID NO: 340, or LCDR1, LCDR2 and LCDR3 of such a LCVR-linked to the CL domain; (2) a heavy chain variable region (HCVR) that comprises the amino acid sequence set forth in SEQ ID NO: 345, or a heavy chain variable region that includes HCDR1, HCDR2 and HCDR3 of such a HCVR-linked to the CH1 domain—and a light chain variable region (LCVR) that comprises the amino acid sequence set forth in SEQ ID NO: 350, or LCDR1, LCDR2 and LCDR3 of such a LCVR-linked to the CL domain; (3) a heavy chain variable region (HCVR) that comprises the amino acid sequence set forth in SEQ ID NO: 355, or a heavy chain variable region that includes HCDR1, HCDR2 and HCDR3 of such a HCVR-linked to the CH1 domain—and a light chain variable region (LCVR) that comprises the amino acid sequence set forth in SEQ ID NO: 360, or LCDR1, LCDR2 and LCDR3 of such a LCVR-linked to the CL domain; (4) a heavy chain variable region (HCVR) that comprises the amino acid sequence set forth in SEQ ID NO: 365, or a heavy chain variable region that includes HCDR1, HCDR2 and HCDR3 of such a HCVR-linked to the CH1 domain—and a light chain variable region (LCVR) that comprises the amino acid sequence set forth in SEQ ID NO: 370, or LCDR1, LCDR2 and LCDR3 of such a LCVR-linked to the CL domain; (5) a heavy chain variable region (HCVR) that comprises the amino acid sequence set forth in SEQ ID NO: 375, or a heavy chain variable region that includes HCDR1, HCDR2 and HCDR3 of such a HCVR-linked to the CH1 domain—and a light chain variable region (LCVR) that comprises the amino acid sequence set forth in SEQ ID NO: 380, or LCDR1, LCDR2 and LCDR3 of such a LCVR-linked to the CL domain; (6) a heavy chain variable region (HCVR) that comprises the amino acid sequence set forth in SEQ ID NO: 385, or a heavy chain variable region that includes HCDR1, HCDR2 and HCDR3 of such a HCVR-linked to the CH1 domain—and a light chain variable region (LCVR) that comprises the amino acid sequence set forth in SEQ ID NO: 390, or LCDR1, LCDR2 and LCDR3 of such a LCVR-linked to the CL domain; (7) a heavy chain variable region (HCVR) that comprises the amino acid sequence set forth in SEQ ID NO: 395, or a heavy chain variable region that includes HCDR1, HCDR2 and HCDR3 of such a HCVR-linked to the CH1 domain—and a light chain variable region (LCVR) that comprises the amino acid sequence set forth in SEQ ID NO: 400, or LCDR1, LCDR2 and LCDR3 of such a LCVR-linked to the CL domain; (8) a heavy chain variable region (HCVR) that comprises the amino acid sequence set forth in SEQ ID NO: 405, or a heavy chain variable region that includes HCDR1, HCDR2 and HCDR3 of such a HCVR-linked to the CH1 domain—and a light chain variable region (LCVR) that comprises the amino acid sequence set forth in SEQ ID NO: 410, or LCDR1, LCDR2 and LCDR3 of such a LCVR-linked to the CL domain; (9) a heavy chain variable region (HCVR) that comprises the amino acid sequence set forth in SEQ ID NO: 415, or a heavy chain variable region that includes HCDR1, HCDR2 and HCDR3 of such a HCVR-linked to the CH1 domain—and a light chain variable region (LCVR) that comprises the amino acid sequence set forth in SEQ ID NO: 420, or LCDR1, LCDR2 and LCDR3 of such a LCVR-linked to the CL domain; (10) a heavy chain variable region (HCVR) that comprises the amino acid sequence set forth in SEQ ID NO: 425, or a heavy chain variable region that includes HCDR1, HCDR2 and HCDR3 of such a HCVR-linked to the CH1 domain—and a light chain variable region (LCVR) that comprises the amino acid sequence set forth in SEQ ID NO: 430, or LCDR1, LCDR2 and LCDR3 of such a LCVR-linked to the CL domain; (11) a heavy chain variable region (HCVR) that comprises the amino acid sequence set forth in SEQ ID NO: 435, or a heavy chain variable region that includes HCDR1, HCDR2 and HCDR3 of such a HCVR-linked to the CH1 domain—and a light chain variable region (LCVR) that comprises the amino acid sequence set forth in SEQ ID NO: 440, or LCDR1, LCDR2 and LCDR3 of such a LCVR-linked to the CL domain; (12) a heavy chain variable region (HCVR) that comprises the amino acid sequence set forth in SEQ ID NO: 445, or a heavy chain variable region that includes HCDR1, HCDR2 and HCDR3 of such a HCVR-linked to the CH1 domain—and a light chain variable region (LCVR) that comprises the amino acid sequence set forth in SEQ ID NO: 450, or LCDR1, LCDR2 and LCDR3 of such a LCVR-linked to the CL domain; (13) a heavy chain variable region (HCVR) that comprises the amino acid sequence set forth in SEQ ID NO: 455, or a heavy chain variable region that includes HCDR1, HCDR2 and HCDR3 of such a HCVR-linked to the CH1 domain—and a light chain variable region (LCVR) that comprises the amino acid sequence set forth in SEQ ID NO: 460, or LCDR1, LCDR2 and LCDR3 of such a LCVR-linked to the CL domain; (14) a heavy chain variable region (HCVR) that comprises the amino acid sequence set forth in SEQ ID NO: 465, or a heavy chain variable region that includes HCDR1, HCDR2 and HCDR3 of such a HCVR-linked to the CH1 domain—and a light chain variable region (LCVR) that comprises the amino acid sequence set forth in SEQ ID NO: 470, or LCDR1, LCDR2 and LCDR3 of such a LCVR-linked to the CL domain; (15) a heavy chain variable region (HCVR) that comprises the amino acid sequence set forth in SEQ ID NO: 475, or a heavy chain variable region that includes HCDR1, HCDR2 and HCDR3 of such a HCVR-linked to the CH1 domain—and a light chain variable region (LCVR) that comprises the amino acid sequence set forth in SEQ ID NO: 480, or LCDR1, LCDR2 and LCDR3 of such a LCVR-linked to the CL domain; (16) a heavy chain variable region (HCVR) that comprises the amino acid sequence set forth in SEQ ID NO: 485, or a heavy chain variable region that includes HCDR1, HCDR2 and HCDR3 of such a HCVR-linked to the CH1 domain—and a light chain variable region (LCVR) that comprises the amino acid sequence set forth in SEQ ID NO: 490, or LCDR1, LCDR2 and LCDR3 of such a LCVR-linked to the CL domain; (17) a heavy chain variable region (HCVR) that comprises the amino acid sequence set forth in SEQ ID NO: 495, or a heavy chain variable region that includes HCDR1, HCDR2 and HCDR3 of such a HCVR-linked to the CH1 domain—and a light chain variable region (LCVR) that comprises the amino acid sequence set forth in SEQ ID NO: 500, or LCDR1, LCDR2 and LCDR3 of such a LCVR-linked to the CL domain; (18) a heavy chain variable region (HCVR) that comprises the amino acid sequence set forth in SEQ ID NO: 505, or a heavy chain variable region that includes HCDR1, HCDR2 and HCDR3 of such a HCVR-linked to the CH1 domain—and a light chain variable region (LCVR) that comprises the amino acid sequence set forth in SEQ ID NO: 510, or LCDR1, LCDR2 and LCDR3 of such a LCVR-linked to the CL domain; (19) a heavy chain variable region (HCVR) that comprises the amino acid sequence set forth in SEQ ID NO: 515, or a heavy chain variable region that includes HCDR1, HCDR2 and HCDR3 of such a HCVR-linked to the CH1 domain—and a light chain variable region (LCVR) that comprises the amino acid sequence set forth in SEQ ID NO: 520, or LCDR1, LCDR2 and LCDR3 of such a LCVR-linked to the CL domain; (20) a heavy chain variable region (HCVR) that comprises the amino acid sequence set forth in SEQ ID NO: 525, or a heavy chain variable region that includes HCDR1, HCDR2 and HCDR3 of such a HCVR-linked to the CH1 domain—and a light chain variable region (LCVR) that comprises the amino acid sequence set forth in SEQ ID NO: 530, or LCDR1, LCDR2 and LCDR3 of such a LCVR-linked to the CL domain; (21) a heavy chain variable region (HCVR) that comprises the amino acid sequence set forth in SEQ ID NO: 535, or a heavy chain variable region that includes HCDR1, HCDR2 and HCDR3 of such a HCVR-linked to the CH1 domain—and a light chain variable region (LCVR) that comprises the amino acid sequence set forth in SEQ ID NO: 540, or LCDR1, LCDR2 and LCDR3 of such a LCVR-linked to the CL domain; (22) a heavy chain variable region (HCVR) that comprises the amino acid sequence set forth in SEQ ID NO: 545, or a heavy chain variable region that includes HCDR1, HCDR2 and HCDR3 of such a HCVR-linked to the CH1 domain—and a light chain variable region (LCVR) that comprises the amino acid sequence set forth in SEQ ID NO: 550, or LCDR1, LCDR2 and LCDR3 of such a LCVR-linked to the CL domain; (23) a heavy chain variable region (HCVR) that comprises the amino acid sequence set forth in SEQ ID NO: 555, or a heavy chain variable region that includes HCDR1, HCDR2 and HCDR3 of such a HCVR-linked to the CH1 domain—and a light chain variable region (LCVR) that comprises the amino acid sequence set forth in SEQ ID NO: 560, or LCDR1, LCDR2 and LCDR3 of such a LCVR-linked to the CL domain; (24) a heavy chain variable region (HCVR) that comprises the amino acid sequence set forth in SEQ ID NO: 565, or a heavy chain variable region that includes HCDR1, HCDR2 and HCDR3 of such a HCVR-linked to the CH1 domain—and a light chain variable region (LCVR) that comprises the amino acid sequence set forth in SEQ ID NO: 570, or LCDR1, LCDR2 and LCDR3 of such a LCVR-linked to the CL domain; (25) a heavy chain variable region (HCVR) that comprises the amino acid sequence set forth in SEQ ID NO: 575, or a heavy chain variable region that includes HCDR1, HCDR2 and HCDR3 of such a HCVR-linked to the CH1 domain—and a light chain variable region (LCVR) that comprises the amino acid sequence set forth in SEQ ID NO: 580, or LCDR1, LCDR2 and LCDR3 of such a LCVR-linked to the CL domain; (26) a heavy chain variable region (HCVR) that comprises the amino acid sequence set forth in SEQ ID NO: 585, or a heavy chain variable region that includes HCDR1, HCDR2 and HCDR3 of such a HCVR-linked to the CH1 domain—and a light chain variable region (LCVR) that comprises the amino acid sequence set forth in SEQ ID NO: 590, or LCDR1, LCDR2 and LCDR3 of such a LCVR-linked to the CL domain; (27) a heavy chain variable region (HCVR) that comprises the amino acid sequence set forth in SEQ ID NO: 595, or a heavy chain variable region that includes HCDR1, HCDR2 and HCDR3 of such a HCVR-linked to the CH1 domain—and a light chain variable region (LCVR) that comprises the amino acid sequence set forth in SEQ ID NO: 600, or LCDR1, LCDR2 and LCDR3 of such a LCVR-linked to the CL domain; (28) a heavy chain variable region (HCVR) that comprises the amino acid sequence set forth in SEQ ID NO: 605, or a heavy chain variable region that includes HCDR1, HCDR2 and HCDR3 of such a HCVR-linked to the CH1 domain—and a light chain variable region (LCVR) that comprises the amino acid sequence set forth in SEQ ID NO: 610, or LCDR1, LCDR2 and LCDR3 of such a LCVR-linked to the CL domain; (29) a heavy chain variable region (HCVR) that comprises the amino acid sequence set forth in SEQ ID NO: 615, or a heavy chain variable region that includes HCDR1, HCDR2 and HCDR3 of such a HCVR-linked to the CH1 domain—and a light chain variable region (LCVR) that comprises the amino acid sequence set forth in SEQ ID NO: 620, or LCDR1, LCDR2 and LCDR3 of such a LCVR-linked to the CL domain; (30) a heavy chain variable region (HCVR) that comprises the amino acid sequence set forth in SEQ ID NO: 625, or a heavy chain variable region that includes HCDR1, HCDR2 and HCDR3 of such a HCVR-linked to the CH1 domain—and a light chain variable region (LCVR) that comprises the amino acid sequence set forth in SEQ ID NO: 630, or LCDR1, LCDR2 and LCDR3 of such a LCVR-linked to the CL domain; (31) a heavy chain variable region (HCVR) that comprises the amino acid sequence set forth in SEQ ID NO: 635, or a heavy chain variable region that includes HCDR1, HCDR2 and HCDR3 of such a HCVR-linked to the CH1 domain—and a light chain variable region (LCVR) that comprises the amino acid sequence set forth in SEQ ID NO: 640, or LCDR1, LCDR2 and LCDR3 of such a LCVR-linked to the CL domain; and/or (32) a heavy chain variable region (HCVR) that comprises the amino acid sequence set forth in SEQ ID NO: 645, or a heavy chain variable region that includes HCDR1, HCDR2 and HCDR3 of such a HCVR-linked to the CH1 domain—and a light chain variable region (LCVR) that comprises the amino acid sequence set forth in SEQ ID NO: 650, or LCDR1, LCDR2 and LCDR3 of such a LCVR-linked to the CL domain. For example, the CH1 can be SEQ ID NO: 720 or 792.

[0567] In one example, the Fab protein can comprise: (1) a light chain that comprises the amino acid sequence set forth in SEQ ID NO: 721 and a heavy chain that comprises the amino acid sequence set forth in SEQ ID NO: 722 (31874B); (2) a light chain that comprises the amino acid sequence set forth in SEQ ID NO: 723 and a heavy chain that comprises the amino acid sequence set forth in SEQ ID NO: 724 (31863B); (3) a light chain that comprises the amino acid sequence set forth in SEQ ID NO: 725 and a heavy chain that comprises the amino acid sequence set forth in SEQ ID NO: 726 (69348); (4) a light chain that comprises the amino acid sequence set forth in SEQ ID NO: 727 and a heavy chain that comprises the amino acid sequence set forth in SEQ ID NO: 728 (69340); (5) a light chain that comprises the amino acid sequence set forth in SEQ ID NO: 729 and a heavy chain that comprises the amino acid sequence set forth in SEQ ID NO: 730 (69331); (6) a light chain that comprises the amino acid sequence set forth in SEQ ID NO: 731 and a heavy chain that comprises the amino acid sequence set forth in SEQ ID NO: 732 (69332); (7) a light chain that comprises the amino acid sequence set forth in SEQ ID NO: 733 and a heavy chain that comprises the amino acid sequence set forth in SEQ ID NO: 734 (69326); (8) a light chain that comprises the amino acid sequence set forth in SEQ ID NO: 735 and a heavy chain that comprises the amino acid sequence set forth in SEQ ID NO: 736 (69329); (9) a light chain that comprises the amino acid sequence set forth in SEQ ID NO: 737 and a heavy chain that comprises the amino acid sequence set forth in SEQ ID NO: 738 (69323); (10) a light chain that comprises the amino acid sequence set forth in SEQ ID NO: 739 and a heavy chain that comprises the amino acid sequence set forth in SEQ ID NO: 740 (69305); (11) a light chain that comprises the amino acid sequence set forth in SEQ ID NO: 741 and a heavy chain that comprises the amino acid sequence set forth in SEQ ID NO: 742 (69307); (12) a light chain that comprises the amino acid sequence set forth in SEQ ID NO: 743 and a heavy chain that comprises the amino acid sequence set forth in SEQ ID NO: 744 (12795B); (13) a light chain that comprises the amino acid sequence set forth in SEQ ID NO: 745 and a heavy chain that comprises the amino acid sequence set forth in SEQ ID NO: 746 or SEQ ID NO: 785 (12798B); (14) a light chain that comprises the amino acid sequence set forth in SEQ ID NO: 747 and a heavy chain that comprises the amino acid sequence set forth in SEQ ID NO: 748 or SEQ ID NO: 786 (12799B); (15) a light chain that comprises the amino acid sequence set forth in SEQ ID NO: 749 and a heavy chain that comprises the amino acid sequence set forth in SEQ ID NO: 750 (12801B); (16) a light chain that comprises the amino acid sequence set forth in SEQ ID NO: 751 and a heavy chain that comprises the amino acid sequence set forth in SEQ ID NO: 752 (12802B); (17) a light chain that comprises the amino acid sequence set forth in SEQ ID NO: 753 and a heavy chain that comprises the amino acid sequence set forth in SEQ ID NO: 754 (12808B); (18) a light chain that comprises the amino acid sequence set forth in SEQ ID NO: 755 and a heavy chain that comprises the amino acid sequence set forth in SEQ ID NO: 756 (12812B); (19) a light chain that comprises the amino acid sequence set forth in SEQ ID NO: 757 and a heavy chain that comprises the amino acid sequence set forth in SEQ ID NO: 758 (12816B); (20) a light chain that comprises the amino acid sequence set forth in SEQ ID NO: 759 and a heavy chain that comprises the amino acid sequence set forth in SEQ ID NO: 760 (12833B); (21) a light chain that comprises the amino acid sequence set forth in SEQ ID NO: 761 and a heavy chain that comprises the amino acid sequence set forth in SEQ ID NO: 762 (12834B); (22) a light chain that comprises the amino acid sequence set forth in SEQ ID NO: 763 and a heavy chain that comprises the amino acid sequence set forth in SEQ ID NO: 764 (12835B); (23) a light chain that comprises the amino acid sequence set forth in SEQ ID NO: 765 and a heavy chain that comprises the amino acid sequence set forth in SEQ ID NO: 766 or SEQ ID NO: 787 (12847B); (24) a light chain that comprises the amino acid sequence set forth in SEQ ID NO: 767 and a heavy chain that comprises the amino acid sequence set forth in SEQ ID NO: 768 (12848B); (25) a light chain that comprises the amino acid sequence set forth in SEQ ID NO: 769 and a heavy chain that comprises the amino acid sequence set forth in SEQ ID NO: 770 or SEQ ID NO: 788 (12843B); (26) a light chain that comprises the amino acid sequence set forth in SEQ ID NO: 771 and a heavy chain that comprises the amino acid sequence set forth in SEQ ID NO: 772 (12844B); (27) a light chain that comprises the amino acid sequence set forth in SEQ ID NO: 773 and a heavy chain that comprises the amino acid sequence set forth in SEQ ID NO: 774 or SEQ ID NO: 789 (12845B); (28) a light chain that comprises the amino acid sequence set forth in SEQ ID NO: 775 and a heavy chain that comprises the amino acid sequence set forth in SEQ ID NO: 776 or SEQ ID NO: 790 (12839B); (29) a light chain that comprises the amino acid sequence set forth in SEQ ID NO: 777 and a heavy chain that comprises the amino acid sequence set forth in SEQ ID NO: 778 (12841B); (30) a light chain that comprises the amino acid sequence set forth in SEQ ID NO: 779 and a heavy chain that comprises the amino acid sequence set forth in SEQ ID NO: 780 (12850B); (31) a light chain that comprises the amino acid sequence set forth in SEQ ID NO: 781 and a heavy chain that comprises the amino acid sequence set forth in SEQ ID NO: 782 (69261); or (32) a light chain that comprises the amino acid sequence set forth in SEQ ID NO: 783 and a heavy chain that comprises the amino acid sequence set forth in SEQ ID NO: 784 (69263).

[0568] [00553]“31874B”; “31863B”; “69348”; “69340”; “69331”; “69332”; “69326”; “69329”; “69323”; “69305”; “69307”; “12795B”; “12798B”; “12799B”; “12801B”; “12802B”; “12808B”; “12812B”; “12816B”; “12833B”; “12834B”; “12835B”; “12847B”; “12848B”; “12843B”; “12844B”; “12845B”; “12839B”; “12841B”; “12850B”; “69261”; and “69263” refer to anti-TfR:GAA fusion proteins, e.g., anti-TfR scFv:GAA or anti-TfR Fab:GAA, comprising a light chain variable region comprising the amino acid sequence set forth in SEQ ID NO: 340, 350, 360, 370, 380, 390, 400, 410, 420, 430, 440, 450, 460, 470, 480, 490, 500, 510, 520, 530, 540, 550, 560, 570, 580, 590, 600, 610, 620, 630, 640, or 650 (or a variant thereof), and a heavy chain variable region comprising the amino acid sequence set forth in SEQ ID NO: 335, 345, 355, 365, 375, 385, 395, 405, 415, 425, 435, 445, 455, 465, 475, 485, 495, 505, 515, 525, 535, 545, 555, 565, 575, 585, 595, 605, 615, 625, 635, or 645 (or a variant thereof); which, in the case of an scFv, can be fused together (in either order), e.g., by a peptide linker (e.g., (G₄S)₃) (G₄S=SEQ ID NO: 718), respectively; or that comprise a V_{H} that comprises the CDRs thereof (CDR-H1 (or a variant thereof), CDR-H2 (or a variant thereof) and CDR-H3 (or a variant thereof)) and/or a V_{L} that comprises the CDRs thereof (CDR-L1 (or a variant thereof), CDR-L2 (or a variant thereof) and CDR-L3 (or a variant thereof)), wherein the V_{H} fused to the V_{L} or the V_{L} fused to the V_{H}, in the case of an scFv, can be fused, e.g., by a peptide linker (e.g., (G₄S)₂) (G₄S=SEQ ID NO: 718), to GAA.

[0569] The TfR-binding delivery domain coding sequences in the constructs disclosed herein may include one or more modifications such as codon optimization (e.g., to human codons), depletion of CpG dinucleotides, mutation of cryptic splice sites, addition of one or more glycosylation sites, or any combination thereof. CpG dinucleotides in a construct can limit the therapeutic utility of the construct. First, unmethylated CpG dinucleotides can interact with host toll-like receptor-9 (TLR-9) to stimulate innate, proinflammatory immune responses. Second, once the CpG dinucleotides become methylated, they can result in the suppression of transgene expression coordinated by methyl-CpG binding proteins. Cryptic splice sites are sequences in a pre-messenger RNA that are not normally used as splice sites, but that can be activated, for example, by mutations that either inactivate canonical splice sites or create splice sites where one did not exist before. Accurate splice site selection is critical for successful gene expression, and removal of cryptic splice sites can favor use of the normal or intended splice site.

[0570] In one example, a TfR-binding delivery domain coding sequence in a construct disclosed herein has one or more cryptic splice sites mutated or removed. In another example, a TfR-binding delivery domain coding sequence in a construct disclosed herein has all identified cryptic splice sites mutated or removed. In another example, a TfR-binding delivery domain coding sequence in a construct disclosed herein has one or more CpG dinucleotides removed (i.e., is CpG depleted). In another example, a TfR-binding delivery domain coding sequence in a construct disclosed herein has all CpG dinucleotides removed (i.e., is fully CpG depleted). In another example, a TfR-binding delivery domain coding sequence in a construct disclosed herein is codon optimized (e.g., codon optimized for expression in a human or mammal). In a specific example, a CDTfR63-binding delivery domain coding sequence in a construct disclosed herein has one or more CpG dinucleotides removed (i.e., is CpG depleted) and has one or more cryptic splice sites mutated or removed. In another specific example, a TfR-binding delivery domain coding sequence in a construct disclosed herein has all CpG dinucleotides removed and has one or more or all identified cryptic splice sites mutated or removed. In another specific example, a TfR-binding delivery domain coding sequence in a construct disclosed herein has one or more CpG dinucleotides removed (i.e., is CpG depleted) and is codon optimized (e.g., codon optimized for expression in a human or mammal). In another specific example, a TfR-binding delivery domain coding sequence in a construct disclosed herein has all CpG dinucleotides removed (i.e., is fully CpG depleted) and is codon optimized (e.g., codon optimized for expression in a human or mammal).

[0571] Various anti-TfR scFv coding sequences are provided. In one example, the anti-TfR scFv coding sequence encodes an anti-TfR scFv protein (or an anti-TfR scFv protein comprising a sequence) at least 90%, at least 91%, at least 92%, at least 93%, at least 94%, at least 95%, at least 96%, at least 97%, at least 98%, at least 99%, at least 99.5%, or 100% identical to any one of SEQ ID NOS: 656-687 (and, e.g., retaining TfR-binding activity). Optionally, the anti-TfR scFv coding sequence encodes an anti-TfR scFv protein (or an anti-TfR scFv protein comprising a sequence) at least 95%, at least 96%, at least 97%, at least 98%, at least 99%, at least 99.5%, or 100% identical to any one of SEQ ID NOS: 656-687 (and, e.g., retaining TfR-binding activity). Optionally, the anti-TfR scFv coding sequence in the above examples encodes an anti-TfR scFv protein (or an anti-TfR scFv protein comprising a sequence) at least 99%, at least 99.5%, or 100% identical to any one of SEQ ID NOS: 656-687 (and, e.g., retaining TfR-binding activity). Optionally, the anti-TfR scFv coding sequence in the above examples encodes an anti-TfR scFv protein comprising the sequence set forth in any one of SEQ ID NOS: 656-687. Optionally, the anti-TfR scFv coding sequence in the above examples encodes an anti-TfR scFv protein consisting essentially of the sequence set forth in any one of SEQ ID NOS: 656-687. Optionally, the anti-TfR scFv coding sequence in the above examples encodes an anti-TfR scFv protein consisting of the sequence set forth in any one of SEQ ID NOS: 656-687.

[0572] Various anti-TfR scFv coding sequences are provided. In one example, the anti-TfR scFv coding sequence is (or comprises a sequence) at least 90%, at least 91%, at least 92%, at least 93%, at least 94%, at least 95%, at least 96%, at least 97%, at least 98%, at least 99%, at least 99.5%, or 100% identical to any one of SEQ ID NOS: 705-717. In another example, the anti-TfR scFv coding sequence is (or comprises a sequence) at least 95%, at least 96%, at least 97%, at least 98%, at least 99%, at least 99.5%, or 100% identical to any one of SEQ ID NOS: 705-717. In another example, the anti-TfR scFv coding sequence is (or comprises a sequence) at least 99%, at least 99.5%, or 100% identical to any one of SEQ ID NOS: 705-717. In another example, the anti-TfR scFv coding sequence comprises the sequence set forth in any one of SEQ ID NOS: 705-717. In another example, the anti-TfR scFv coding sequence consists essentially of the sequence set forth in any one of SEQ ID NOS: 705-717. In another example, the anti-TfR scFv coding sequence consists of the sequence set forth in any one of SEQ ID NOS: 705-717. Optionally, the anti-TfR scFv coding sequence encodes an anti-TfR scFv protein (or an anti-TfR scFv protein comprising a sequence) at least 90%, at least 91%, at least 92%, at least 93%, at least 94%, at least 95%, at least 96%, at least 97%, at least 98%, at least 99%, at least 99.5%, or 100% identical to any one of SEQ ID NOS: 658, 667, 669, and 672 (and, e.g., retaining TfR-binding activity). Optionally, the anti-TfR scFv coding sequence encodes an anti-TfR scFv protein (or an anti-TfR scFv protein comprising a sequence) at least 95%, at least 96%, at least 97%, at least 98%, at least 99%, at least 99.5%, or 100% identical to any one of SEQ ID NOS: 658, 667, 669, and 672 (and, e.g., retaining TfR-binding activity). Optionally, the anti-TfR scFv coding sequence in the above examples encodes an anti-TfR scFv protein (or an anti-TfR scFv protein comprising a sequence) at least 99%, at least 99.5%, or 100% identical to any one of SEQ ID NOS: 658, 667, 669, and 672 (and, e.g., retaining TfR-binding activity). Optionally, the anti-TfR scFv coding sequence in the above examples encodes an anti-TfR scFv protein comprising the sequence set forth in any one of SEQ ID NOS: 658, 667, 669, and 672. Optionally, the anti-TfR scFv coding sequence in the above examples encodes an anti-TfR scFv protein consisting essentially of the sequence set forth in any one of SEQ ID NOS: 658, 667, 669, and 672. Optionally, the anti-TfR scFv coding sequence in the above examples encodes an anti-TfR scFv protein consisting of the sequence set forth in any one of SEQ ID NOS: 658, 667, 669, and 672.

[0573] Various anti-TfR scFv coding sequences are provided. In one example, the anti-TfR scFv coding sequence is (or comprises a sequence) at least 90%, at least 91%, at least 92%, at least 93%, at least 94%, at least 95%, at least 96%, at least 97%, at least 98%, at least 99%, at least 99.5%, or 100% identical to any one of SEQ ID NOS: 711-713 and 717. In another example, the anti-TfR scFv coding sequence is (or comprises a sequence) at least 95%, at least 96%, at least 97%, at least 98%, at least 99%, at least 99.5%, or 100% identical to any one of SEQ ID NOS: 711-713 and 717. In another example, the anti-TfR scFv coding sequence is (or comprises a sequence) at least 99%, at least 99.5%, or 100% identical to any one of SEQ ID NOS: 711-713 and 717. In another example, the anti-TfR scFv coding sequence comprises the sequence set forth in any one of SEQ ID NOS: 711-713 and 717. In another example, the anti-TfR scFv coding sequence consists essentially of the sequence set forth in any one of SEQ ID NOS: 711-713 and 717. In another example, the anti-TfR scFv coding sequence consists of the sequence set forth in any one of SEQ ID NOS: 711-713 and 717. Optionally, the anti-TfR scFv coding sequence encodes an anti-TfR scFv protein (or an anti-TfR scFv protein comprising a sequence) at least 90%, at least 91%, at least 92%, at least 93%, at least 94%, at least 95%, at least 96%, at least 97%, at least 98%, at least 99%, at least 99.5%, or 100% identical to SEQ ID NO: 672 (and, e.g., retaining TfR-binding activity). Optionally, the anti-TfR scFv coding sequence encodes an anti-TfR scFv protein (or an anti-TfR scFv protein comprising a sequence) at least 95%, at least 96%, at least 97%, at least 98%, at least 99%, at least 99.5%, or 100% identical to SEQ ID NO: 672 (and, e.g., retaining TfR-binding activity). Optionally, the anti-TfR scFv coding sequence in the above examples encodes an anti-TfR scFv protein (or an anti-TfR scFv protein comprising a sequence) at least 99%, at least 99.5%, or 100% identical to SEQ ID NO: 672 (and, e.g., retaining TfR-binding activity). Optionally, the anti-TfR scFv coding sequence in the above examples encodes an anti-TfR scFv protein comprising the sequence set forth in SEQ ID NO: 672. Optionally, the anti-TfR scFv coding sequence in the above examples encodes an anti-TfR scFv protein consisting essentially of the sequence set forth in SEQ ID NO: 672. Optionally, the anti-TfR scFv coding sequence in the above examples encodes an anti-TfR scFv protein consisting of the sequence set forth in SEQ ID NO: 672.

[0574] In one example, the anti-TfR scFv coding sequence is (or comprises a sequence) at least 90%, at least 91%, at least 92%, at least 93%, at least 94%, at least 95%, at least 96%, at least 97%, at least 98%, at least 99%, at least 99.5%, or 100% identical to SEQ ID NO: 713. In another example, the anti-TfR scFv coding sequence is (or comprises a sequence) at least 90%, at least 91%, at least 92%, at least 93%, at least 94%, at least 95%, at least 96%, at least 97%, at least 98%, at least 99%, at least 99.5%, or 100% identical to SEQ ID NO: 713 and encodes an anti-TfR scFv protein (or an anti-TfR scFv protein comprising a sequence) at least 99%, at least 99.5%, or 100% identical to SEQ ID NO: 672. In another example, the anti-TfR scFv coding sequence is (or comprises a sequence) at least 90%, at least 91%, at least 92%, at least 93%, at least 94%, at least 95%, at least 96%, at least 97%, at least 98%, at least 99%, at least 99.5%, or 100% identical to SEQ ID NO: 713 and encodes an anti-TfR scFv protein comprising the sequence set forth in SEQ ID NO: 672. In another example, the anti-TfR scFv coding sequence is (or comprises a sequence) at least 95%, at least 96%, at least 97%, at least 98%, at least 99%, at least 99.5%, or 100% identical to SEQ ID NO: 713. In another example, the anti-TfR scFv coding sequence is (or comprises a sequence) at least 95%, at least 96%, at least 97%, at least 98%, at least 99%, at least 99.5%, or 100% identical to SEQ ID NO: 713 and encodes an anti-TfR scFv protein (or an anti-TfR scFv protein comprising a sequence) at least 99%, at least 99.5%, or 100% identical to SEQ ID NO: 672. In another example, the anti-TfR scFv coding sequence is (or comprises a sequence) at least 95%, at least 96%, at least 97%, at least 98%, at least 99%, at least 99.5%, or 100% identical to SEQ ID NO: 713 and encodes an anti-TfR scFv protein comprising the sequence set forth in SEQ ID NO: 672. In another example, the anti-TfR scFv coding sequence is (or comprises a sequence) at least 99%, at least 99.5%, or 100% identical to SEQ ID NO: 713. In another example, the anti-TfR scFv coding sequence is (or comprises a sequence) at least 99%, at least 99.5%, or 100% identical to SEQ ID NO: 713 and encodes an anti-TfR scFv protein (or an anti-TfR scFv protein comprising a sequence) at least 99%, at least 99.5%, or 100% identical to SEQ ID NO: 672. In another example, the anti-TfR scFv coding sequence is (or comprises a sequence) at least 99%, at least 99.5%, or 100% identical to SEQ ID NO: 713 and encodes an anti-TfR scFv protein comprising the sequence set forth in SEQ ID NO: 672. In another example, the anti-TfR scFv coding sequence comprises the sequence set forth in SEQ ID NO: 713. In another example, the anti-TfR scFv coding sequence consists essentially of the sequence set forth in SEQ ID NO: 713. In another example, the anti-TfR scFv coding sequence consists of the sequence set forth in SEQ ID NO: 713. The anti-TfR coding sequence can be, for example, CpG-depleted (e.g., fully CpG-depleted) and/or codon optimized. For example, the anti-TfR scFv coding sequence can be CpG depleted (e.g., fully CpG-depleted) and codon optimized. Optionally, the anti-TfR scFv coding sequence encodes an anti-TfR scFv protein (or an anti-TfR scFv protein comprising a sequence) at least 90%, at least 91%, at least 92%, at least 93%, at least 94%, at least 95%, at least 96%, at least 97%, at least 98%, at least 99%, at least 99.5%, or 100% identical to SEQ ID NO: 672 (and, e.g., retaining TfR-binding activity). Optionally, the anti-TfR scFv coding sequence encodes an anti-TfR scFv protein (or an anti-TfR scFv protein comprising a sequence) at least 95%, at least 96%, at least 97%, at least 98%, at least 99%, at least 99.5%, or 100% identical to SEQ ID NO: 672 (and, e.g., retaining TfR-binding activity). Optionally, the anti-TfR scFv coding sequence in the above examples encodes an anti-TfR scFv protein (or an anti-TfR scFv protein comprising a sequence) at least 99%, at least 99.5%, or 100% identical to SEQ ID NO: 672 (and, e.g., retaining TfR-binding activity). Optionally, the anti-TfR scFv coding sequence in the above examples encodes an anti-TfR scFv protein comprising the sequence set forth in SEQ ID NO: 672. Optionally, the anti-TfR scFv coding sequence in the above examples encodes an anti-TfR scFv protein consisting essentially of the sequence set forth in SEQ ID NO: 672. Optionally, the anti-TfR scFv coding sequence in the above examples encodes an anti-TfR scFv protein consisting of the sequence set forth in SEQ ID NO: 672.

[0575] Various codon optimized anti-TfR scFv coding sequences are provided. The anti-TfR scFv coding sequence can be, for example, CpG-depleted (e.g., fully CpG depleted) and/or codon optimized (e.g., CpG depleted (e.g., fully CpG-depleted) and codon optimized). In one example, the anti-TfR scFv coding sequence is (or comprises a sequence) at least 90%, at least 91%, at least 92%, at least 93%, at least 94%, at least 95%, at least 96%, at least 97%, at least 98%, at least 99%, at least 99.5%, or 100% identical to any one of SEQ ID NOS: 705-713. In another example, the anti-TfR scFv coding sequence is (or comprises a sequence) at least 95%, at least 96%, at least 97%, at least 98%, at least 99%, at least 99.5%, or 100% identical to any one of SEQ ID NOS: 705-713. In another example, the anti-TfR scFv coding sequence is (or comprises a sequence) at least 99%, at least 99.5%, or 100% identical to any one of SEQ ID NOS: 705-713. In another example, the anti-TfR scFv coding sequence comprises the sequence set forth in any one of SEQ ID NOS: 705-713. In another example, the anti-TfR scFv coding sequence consists essentially of the sequence set forth in any one of SEQ ID NOS: 705-713. In another example, the anti-TfR scFv coding sequence consists of the sequence set forth in any one of SEQ ID NOS: 705-713. Optionally, the anti-TfR scFv coding sequence encodes an anti-TfR scFv protein (or an anti-TfR scFv protein comprising a sequence) at least 90%, at least 91%, at least 92%, at least 93%, at least 94%, at least 95%, at least 96%, at least 97%, at least 98%, at least 99%, at least 99.5%, or 100% identical to any one of SEQ ID NOS: 658, 667, 669, and 672 (and, e.g., retaining TfR-binding activity). Optionally, the anti-TfR scFv coding sequence encodes an anti-TfR scFv protein (or an anti-TfR scFv protein comprising a sequence) at least 95%, at least 96%, at least 97%, at least 98%, at least 99%, at least 99.5%, or 100% identical to any one of SEQ ID NOS: 658, 667, 669, and 672 (and, e.g., retaining TfR-binding activity). Optionally, the anti-TfR scFv coding sequence in the above examples encodes an anti-TfR scFv protein (or an anti-TfR scFv protein comprising a sequence) at least 99%, at least 99.5%, or 100% identical to any one of SEQ ID NOS: 658, 667, 669, and 672 (and, e.g., retaining TfR-binding activity). Optionally, the anti-TfR scFv coding sequence in the above examples encodes an anti-TfR scFv protein comprising the sequence set forth in any one of SEQ ID NOS: 658, 667, 669, and 672. Optionally, the anti-TfR scFv coding sequence in the above examples encodes an anti-TfR scFv protein consisting essentially of the sequence set forth in any one of SEQ ID NOS: 658, 667, 669, and 672. Optionally, the anti-TfR scFv coding sequence in the above examples encodes an anti-TfR scFv protein consisting of the sequence set forth in any one of SEQ ID NOS: 658, 667, 669, and 672.

[0576] Various codon optimized anti-TfR scFv coding sequences are provided. The anti-TfR scFv coding sequence can be, for example, CpG-depleted (e.g., fully CpG depleted) and/or codon optimized (e.g., CpG depleted (e.g., fully CpG-depleted) and codon optimized). In one example, the anti-TfR scFv coding sequence is (or comprises a sequence) at least 90%, at least 91%, at least 92%, at least 93%, at least 94%, at least 95%, at least 96%, at least 97%, at least 98%, at least 99%, at least 99.5%, or 100% identical to any one of SEQ ID NOS: 711-713. In another example, the anti-TfR scFv coding sequence is (or comprises a sequence) at least 95%, at least 96%, at least 97%, at least 98%, at least 99%, at least 99.5%, or 100% identical to any one of SEQ ID NOS: 711-713. In another example, the anti-TfR scFv coding sequence is (or comprises a sequence) at least 99%, at least 99.5%, or 100% identical to any one of SEQ ID NOS: 711-713. In another example, the anti-TfR scFv coding sequence comprises the sequence set forth in any one of SEQ ID NOS: 711-713. In another example, the anti-TfR scFv coding sequence consists essentially of the sequence set forth in any one of SEQ ID NOS: 711-713. In another example, the anti-TfR scFv coding sequence consists of the sequence set forth in any one of SEQ ID NOS: 711-713. Optionally, the anti-TfR scFv coding sequence encodes an anti-TfR scFv protein (or an anti-TfR scFv protein comprising a sequence) at least 90%, at least 91%, at least 92%, at least 93%, at least 94%, at least 95%, at least 96%, at least 97%, at least 98%, at least 99%, at least 99.5%, or 100% identical to SEQ ID NO: 672 (and, e.g., retaining TfR-binding activity). Optionally, the anti-TfR scFv coding sequence encodes an anti-TfR scFv protein (or an anti-TfR scFv protein comprising a sequence) at least 95%, at least 96%, at least 97%, at least 98%, at least 99%, at least 99.5%, or 100% identical to SEQ ID NO: 672 (and, e.g., retaining TfR-binding activity). Optionally, the anti-TfR scFv coding sequence in the above examples encodes an anti-TfR scFv protein (or an anti-TfR scFv protein comprising a sequence) at least 99%, at least 99.5%, or 100% identical to SEQ ID NO: 672 (and, e.g., retaining TfR-binding activity). Optionally, the anti-TfR scFv coding sequence in the above examples encodes an anti-TfR scFv protein comprising the sequence set forth in SEQ ID NO: 672. Optionally, the anti-TfR scFv coding sequence in the above examples encodes an anti-TfR scFv protein consisting essentially of the sequence set forth in SEQ ID NO: 672. Optionally, the anti-TfR scFv coding sequence in the above examples encodes an anti-TfR scFv protein consisting of the sequence set forth in SEQ ID NO: 672.

[0577] In one example, the anti-TfR scFv coding sequence is (or comprises a sequence) at least 90%, at least 91%, at least 92%, at least 93%, at least 94%, at least 95%, at least 96%, at least 97%, at least 98%, at least 99%, at least 99.5%, or 100% identical to SEQ ID NO: 711. In another example, the anti-TfR scFv coding sequence is (or comprises a sequence) at least 90%, at least 91%, at least 92%, at least 93%, at least 94%, at least 95%, at least 96%, at least 97%, at least 98%, at least 99%, at least 99.5%, or 100% identical to SEQ ID NO: 711 and encodes an anti-TfR scFv protein (or an anti-TfR scFv protein comprising a sequence) at least 99%, at least 99.5%, or 100% identical to SEQ ID NO: 672. In another example, the anti-TfR scFv coding sequence is (or comprises a sequence) at least 90%, at least 91%, at least 92%, at least 93%, at least 94%, at least 95%, at least 96%, at least 97%, at least 98%, at least 99%, at least 99.5%, or 100% identical to SEQ ID NO: 711 and encodes an anti-TfR scFv protein comprising the sequence set forth in SEQ ID NO: 672. In another example, the anti-TfR scFv coding sequence is (or comprises a sequence) at least 95%, at least 96%, at least 97%, at least 98%, at least 99%, at least 99.5%, or 100% identical to SEQ ID NO: 711. In another example, the anti-TfR scFv coding sequence is (or comprises a sequence) at least 95%, at least 96%, at least 97%, at least 98%, at least 99%, at least 99.5%, or 100% identical to SEQ ID NO: 711 and encodes an anti-TfR scFv protein (or an anti-TfR scFv protein comprising a sequence) at least 99%, at least 99.5%, or 100% identical to SEQ ID NO: 672. In another example, the anti-TfR scFv coding sequence is (or comprises a sequence) at least 95%, at least 96%, at least 97%, at least 98%, at least 99%, at least 99.5%, or 100% identical to SEQ ID NO: 711 and encodes an anti-TfR scFv protein comprising the sequence set forth in SEQ ID NO: 672. In another example, the anti-TfR scFv coding sequence is (or comprises a sequence) at least 99%, at least 99.5%, or 100% identical to SEQ ID NO: 711. In another example, the anti-TfR scFv coding sequence is (or comprises a sequence) at least 99%, at least 99.5%, or 100% identical to SEQ ID NO: 711 and encodes an anti-TfR scFv protein (or an anti-TfR scFv protein comprising a sequence) at least 99%, at least 99.5%, or 100% identical to SEQ ID NO: 672. In another example, the anti-TfR scFv coding sequence is (or comprises a sequence) at least 99%, at least 99.5%, or 100% identical to SEQ ID NO: 711 and encodes an anti-TfR scFv protein comprising the sequence set forth in SEQ ID NO: 672. In another example, the anti-TfR scFv coding sequence comprises the sequence set forth in SEQ ID NO: 711. In another example, the anti-TfR scFv coding sequence consists essentially of the sequence set forth in SEQ ID NO: 711. In another example, the anti-TfR scFv coding sequence consists of the sequence set forth in SEQ ID NO: 711. The anti-TfR coding sequence can be, for example, CpG-depleted (e.g., fully CpG-depleted) and/or codon optimized. For example, the anti-TfR scFv coding sequence can be CpG depleted (e.g., fully CpG-depleted) and codon optimized. Optionally, the anti-TfR scFv coding sequence encodes an anti-TfR scFv protein (or an anti-TfR scFv protein comprising a sequence) at least 90%, at least 91%, at least 92%, at least 93%, at least 94%, at least 95%, at least 96%, at least 97%, at least 98%, at least 99%, at least 99.5%, or 100% identical to SEQ ID NO: 672 (and, e.g., retaining TfR-binding activity). Optionally, the anti-TfR scFv coding sequence encodes an anti-TfR scFv protein (or an anti-TfR scFv protein comprising a sequence) at least 95%, at least 96%, at least 97%, at least 98%, at least 99%, at least 99.5%, or 100% identical to SEQ ID NO: 672 (and, e.g., retaining TfR-binding activity). Optionally, the anti-TfR scFv coding sequence in the above examples encodes an anti-TfR scFv protein (or an anti-TfR scFv protein comprising a sequence) at least 99%, at least 99.5%, or 100% identical to SEQ ID NO: 672 (and, e.g., retaining TfR-binding activity). Optionally, the anti-TfR scFv coding sequence in the above examples encodes an anti-TfR scFv protein comprising the sequence set forth in SEQ ID NO: 672. Optionally, the anti-TfR scFv coding sequence in the above examples encodes an anti-TfR scFv protein consisting essentially of the sequence set forth in SEQ ID NO: 672. Optionally, the anti-TfR scFv coding sequence in the above examples encodes an anti-TfR scFv protein consisting of the sequence set forth in SEQ ID NO: 672.

[0578] Various codon optimized anti-TfR scFv coding sequences are provided. The anti-TfR scFv coding sequence can be, for example, CpG-depleted (e.g., fully CpG depleted) and/or codon optimized (e.g., CpG depleted (e.g., fully CpG-depleted) and codon optimized). In one example, the anti-TfR scFv coding sequence is (or comprises a sequence) at least 90%, at least 91%, at least 92%, at least 93%, at least 94%, at least 95%, at least 96%, at least 97%, at least 98%, at least 99%, at least 99.5%, or 100% identical to any one of SEQ ID NOS: 708-710. In another example, the anti-TfR scFv coding sequence is (or comprises a sequence) at least 95%, at least 96%, at least 97%, at least 98%, at least 99%, at least 99.5%, or 100% identical to any one of SEQ ID NOS: 708-710. In another example, the anti-TfR scFv coding sequence is (or comprises a sequence) at least 99%, at least 99.5%, or 100% identical to any one of SEQ ID NOS: 708-710. In another example, the anti-TfR scFv coding sequence comprises the sequence set forth in any one of SEQ ID NOS: 708-710. In another example, the anti-TfR scFv coding sequence consists essentially of the sequence set forth in any one of SEQ ID NOS: 708-710. In another example, the anti-TfR scFv coding sequence consists of the sequence set forth in any one of SEQ ID NOS: 708-710. Optionally, the anti-TfR scFv coding sequence encodes an anti-TfR scFv protein (or an anti-TfR scFv protein comprising a sequence) at least 90%, at least 91%, at least 92%, at least 93%, at least 94%, at least 95%, at least 96%, at least 97%, at least 98%, at least 99%, at least 99.5%, or 100% identical to SEQ ID NO: 669 (and, e.g., retaining TfR-binding activity). Optionally, the anti-TfR scFv coding sequence encodes an anti-TfR scFv protein (or an anti-TfR scFv protein comprising a sequence) at least 95%, at least 96%, at least 97%, at least 98%, at least 99%, at least 99.5%, or 100% identical to SEQ ID NO: 669 (and, e.g., retaining TfR-binding activity). Optionally, the anti-TfR scFv coding sequence in the above examples encodes an anti-TfR scFv protein (or an anti-TfR scFv protein comprising a sequence) at least 99%, at least 99.5%, or 100% identical to SEQ ID NO: 669 (and, e.g., retaining TfR-binding activity). Optionally, the anti-TfR scFv coding sequence in the above examples encodes an anti-TfR scFv protein comprising the sequence set forth in SEQ ID NO: 669. Optionally, the anti-TfR scFv coding sequence in the above examples encodes an anti-TfR scFv protein consisting essentially of the sequence set forth in SEQ ID NO: 669. Optionally, the anti-TfR scFv coding sequence in the above examples encodes an anti-TfR scFv protein consisting of the sequence set forth in SEQ ID NO: 669.

[0579] In one example, the anti-TfR scFv coding sequence is (or comprises a sequence) at least 90%, at least 91%, at least 92%, at least 93%, at least 94%, at least 95%, at least 96%, at least 97%, at least 98%, at least 99%, at least 99.5%, or 100% identical to SEQ ID NO: 708. In another example, the anti-TfR scFv coding sequence is (or comprises a sequence) at least 90%, at least 91%, at least 92%, at least 93%, at least 94%, at least 95%, at least 96%, at least 97%, at least 98%, at least 99%, at least 99.5%, or 100% identical to SEQ ID NO: 708 and encodes an anti-TfR scFv protein (or an anti-TfR scFv protein comprising a sequence) at least 99%, at least 99.5%, or 100% identical to SEQ ID NO: 669. In another example, the anti-TfR scFv coding sequence is (or comprises a sequence) at least 90%, at least 91%, at least 92%, at least 93%, at least 94%, at least 95%, at least 96%, at least 97%, at least 98%, at least 99%, at least 99.5%, or 100% identical to SEQ ID NO: 708 and encodes an anti-TfR scFv protein comprising the sequence set forth in SEQ ID NO: 669. In another example, the anti-TfR scFv coding sequence is (or comprises a sequence) at least 95%, at least 96%, at least 97%, at least 98%, at least 99%, at least 99.5%, or 100% identical to SEQ ID NO: 708. In another example, the anti-TfR scFv coding sequence is (or comprises a sequence) at least 95%, at least 96%, at least 97%, at least 98%, at least 99%, at least 99.5%, or 100% identical to SEQ ID NO: 708 and encodes an anti-TfR scFv protein (or an anti-TfR scFv protein comprising a sequence) at least 99%, at least 99.5%, or 100% identical to SEQ ID NO: 669. In another example, the anti-TfR scFv coding sequence is (or comprises a sequence) at least 95%, at least 96%, at least 97%, at least 98%, at least 99%, at least 99.5%, or 100% identical to SEQ ID NO: 708 and encodes an anti-TfR scFv protein comprising the sequence set forth in SEQ ID NO: 669. In another example, the anti-TfR scFv coding sequence is (or comprises a sequence) at least 99%, at least 99.5%, or 100% identical to SEQ ID NO: 708. In another example, the anti-TfR scFv coding sequence is (or comprises a sequence) at least 99%, at least 99.5%, or 100% identical to SEQ ID NO: 708 and encodes an anti-TfR scFv protein (or an anti-TfR scFv protein comprising a sequence) at least 99%, at least 99.5%, or 100% identical to SEQ ID NO: 669. In another example, the anti-TfR scFv coding sequence is (or comprises a sequence) at least 99%, at least 99.5%, or 100% identical to SEQ ID NO: 708 and encodes an anti-TfR scFv protein comprising the sequence set forth in SEQ ID NO: 669. In another example, the anti-TfR scFv coding sequence comprises the sequence set forth in SEQ ID NO: 708. In another example, the anti-TfR scFv coding sequence consists essentially of the sequence set forth in SEQ ID NO: 708. In another example, the anti-TfR scFv coding sequence consists of the sequence set forth in SEQ ID NO: 708. The anti-TfR coding sequence can be, for example, CpG-depleted (e.g., fully CpG-depleted) and/or codon optimized. For example, the anti-TfR scFv coding sequence can be CpG depleted (e.g., fully CpG-depleted) and codon optimized. Optionally, the anti-TfR scFv coding sequence encodes an anti-TfR scFv protein (or an anti-TfR scFv protein comprising a sequence) at least 90%, at least 91%, at least 92%, at least 93%, at least 94%, at least 95%, at least 96%, at least 97%, at least 98%, at least 99%, at least 99.5%, or 100% identical to SEQ ID NO: 669 (and, e.g., retaining TfR-binding activity). Optionally, the anti-TfR scFv coding sequence encodes an anti-TfR scFv protein (or an anti-TfR scFv protein comprising a sequence) at least 95%, at least 96%, at least 97%, at least 98%, at least 99%, at least 99.5%, or 100% identical to SEQ ID NO: 669 (and, e.g., retaining TfR-binding activity). Optionally, the anti-TfR scFv coding sequence in the above examples encodes an anti-TfR scFv protein (or an anti-TfR scFv protein comprising a sequence) at least 99%, at least 99.5%, or 100% identical to SEQ ID NO: 669 (and, e.g., retaining TfR-binding activity). Optionally, the anti-TfR scFv coding sequence in the above examples encodes an anti-TfR scFv protein comprising the sequence set forth in SEQ ID NO: 669. Optionally, the anti-TfR scFv coding sequence in the above examples encodes an anti-TfR scFv protein consisting essentially of the sequence set forth in SEQ ID NO: 669. Optionally, the anti-TfR scFv coding sequence in the above examples encodes an anti-TfR scFv protein consisting of the sequence set forth in SEQ ID NO: 669.

[0580] Various codon optimized anti-TfR scFv coding sequences are provided. The anti-TfR scFv coding sequence can be, for example, CpG-depleted (e.g., fully CpG depleted) and/or codon optimized (e.g., CpG depleted (e.g., fully CpG-depleted) and codon optimized). In one example, the anti-TfR scFv coding sequence is (or comprises a sequence) at least 90%, at least 91%, at least 92%, at least 93%, at least 94%, at least 95%, at least 96%, at least 97%, at least 98%, at least 99%, at least 99.5%, or 100% identical to any one of SEQ ID NOS: 705-707. In another example, the anti-TfR scFv coding sequence is (or comprises a sequence) at least 95%, at least 96%, at least 97%, at least 98%, at least 99%, at least 99.5%, or 100% identical to any one of SEQ ID NOS: 705-707. In another example, the anti-TfR scFv coding sequence is (or comprises a sequence) at least 99%, at least 99.5%, or 100% identical to any one of SEQ ID NOS: 705-707. In another example, the anti-TfR scFv coding sequence comprises the sequence set forth in any one of SEQ ID NOS: 705-707. In another example, the anti-TfR scFv coding sequence consists essentially of the sequence set forth in any one of SEQ ID NOS: 705-707. In another example, the anti-TfR scFv coding sequence consists of the sequence set forth in any one of SEQ ID NOS: 705-707. Optionally, the anti-TfR scFv coding sequence encodes an anti-TfR scFv protein (or an anti-TfR scFv protein comprising a sequence) at least 90%, at least 91%, at least 92%, at least 93%, at least 94%, at least 95%, at least 96%, at least 97%, at least 98%, at least 99%, at least 99.5%, or 100% identical to SEQ ID NO: 658 (and, e.g., retaining TfR-binding activity). Optionally, the anti-TfR scFv coding sequence encodes an anti-TfR scFv protein (or an anti-TfR scFv protein comprising a sequence) at least 95%, at least 96%, at least 97%, at least 98%, at least 99%, at least 99.5%, or 100% identical to SEQ ID NO: 658 (and, e.g., retaining TfR-binding activity). Optionally, the anti-TfR scFv coding sequence in the above examples encodes an anti-TfR scFv protein (or an anti-TfR scFv protein comprising a sequence) at least 99%, at least 99.5%, or 100% identical to SEQ ID NO: 658 (and, e.g., retaining TfR-binding activity). Optionally, the anti-TfR scFv coding sequence in the above examples encodes an anti-TfR scFv protein comprising the sequence set forth in SEQ ID NO: 658. Optionally, the anti-TfR scFv coding sequence in the above examples encodes an anti-TfR scFv protein consisting essentially of the sequence set forth in SEQ ID NO: 658. Optionally, the anti-TfR scFv coding sequence in the above examples encodes an anti-TfR scFv protein consisting of the sequence set forth in SEQ ID NO: 658.

[0581] When specific anti-TfR scFv or multidomain therapeutic protein nucleic acid constructs sequences are disclosed herein, they are meant to encompass the sequence disclosed or the reverse complement of the sequence. For example, if an anti-TfR scFv or multidomain therapeutic protein nucleic acid construct disclosed herein consists of the hypothetical sequence 5′-CTGGACCGA-3′, it is also meant to encompass the reverse complement of that sequence (5′-TCGGTCCAG-3′). Likewise, when construct elements are disclosed herein in a specific 5′ to 3′ order, they are also meant to encompass the reverse complement of the order of those elements. One reason for this is that, in many embodiments disclosed herein, the anti-TfR scFv or multidomain therapeutic protein nucleic acid constructs are part of a single-stranded recombinant AAV vector. Single-stranded AAV genomes are packaged as either sense (plus-stranded) or anti-sense (minus-stranded genomes), and single-stranded AAV genomes of + and − polarity are packaged with equal frequency into mature rAAV virions. See, e.g., LING et al. (2015) J. Mol. Genet. Med. 9(3):175, Zhou et al. (2008) Mol. Ther. 16(3):494-499, and Samulski et al. (1987) J. Virol. 61:3096-3101, each of which is herein incorporated by reference in its entirety for all purposes.

### (5) Bidirectional Constructs

[0582] The nucleic acid constructs disclosed herein can be bidirectional constructs. Such bidirectional constructs can allow for enhanced insertion and expression of encoded polypeptide of interest. When used in combination with a nuclease agent (e.g., CRISPR/Cas system, zinc finger nuclease (ZFN) system; transcription activator-like effector nuclease (TALEN) system) as described herein, the bidirectionality of the nucleic acid construct allows the construct to be inserted in either direction (i.e., is not limited to insertion in one direction) within a target genomic locus or a cleavage site or target insertion site, allowing the expression of the polypeptide of interest when inserted in either orientation, thereby enhancing expression efficiency.

[0583] A bidirectional construct as disclosed herein can comprise at least two nucleic acid segments, wherein a first segment comprises a first coding sequence for the polypeptide of interest, and a second segment comprises the reverse complement of a second coding sequence for the polypeptide of interest, or vice versa. However, other bidirectional constructs disclosed herein can comprise at least two nucleic acid segments, wherein the first segment comprises a coding sequence for a polypeptide of interest, and the second segment comprises the reverse complement of a coding sequence for another protein, or vice versa. A reverse complement refers to a sequence that is a complement sequence of a reference sequence, wherein the complement sequence is written in the reverse orientation. For example, for a hypothetical sequence 5′-CTGGACCGA-3′, the perfect complement sequence is 3′-GACCTGGCT-5′, and the perfect reverse complement is written 5′-TCGGTCCAG-3′. A reverse complement sequence need not be perfect and may still encode the same polypeptide or a similar polypeptide as the reference sequence. Due to codon usage redundancy, a reverse complement can diverge from a reference sequence that encodes the same polypeptide. The coding sequences can optionally comprise one or more additional sequences, such as sequences encoding amino- or carboxy-terminal amino acid sequences such as a signal sequence, label sequence (e.g., HiBit), or heterologous functional sequence (e.g., nuclear localization sequence (NLS) or self-cleaving peptide) linked to the polypeptide of interest or other protein.

[0584] When specific bidirectional construct sequences are disclosed herein, they are meant to encompass the sequence disclosed or the reverse complement of the sequence. For example, if a bidirectional construct disclosed herein consists of the hypothetical sequence 5′-CTGGACCGA-3′, it is also meant to encompass the reverse complement of that sequence (5′-TCGGTCCAG-3′). Likewise, when bidirectional construct elements are disclosed herein in a specific 5′ to 3′ order, they are also meant to encompass the reverse complement of the order of those elements. For example, if a bidirectional construct is disclosed herein that comprises from 5′ to 3′ a first splice acceptor, a first coding sequence, a first terminator, a reverse complement of a second terminator, a reverse complement of a second coding sequence, and a reverse complement of a second splice acceptor, it is also meant to encompass a construct comprising from 5′ to 3′ the second splice acceptor, the second coding sequence, the second terminator, a reverse complement of the first terminator, a reverse complement of the first coding sequence, and a reverse complement of the first splice acceptor. One reason for this is that, in many embodiments disclosed herein, the bidirectional constructs are part of a single-stranded recombinant AAV vector. Single-stranded AAV genomes are packaged as either sense (plus-stranded) or anti-sense (minus-stranded genomes), and single-stranded AAV genomes of + and − polarity are packaged with equal frequency into mature rAAV virions. See, e.g., LING et al. (2015) J. Mol. Genet. Med. 9(3):175, Zhou et al. (2008) Mol. Ther. 16(3):494-499, and Samulski et al. (1987) J. Virol. 61:3096-3101, each of which is herein incorporated by reference in its entirety for all purposes.

[0585] When the at least two segments both encode a polypeptide of interest, the at least two segments can encode the same polypeptide of interest or different polypeptides of interest. The different polypeptides of interest can be at least about 90%, at least about 95%, at least about 96%, at least about 97%, at least about 98%, at least about 99%, or at least about 99.5% identical. For example, the first segment can encode a wild type polypeptide of interest or fragment thereof, and the second segment can encode a variant of the polypeptide of interest or fragment thereof, or vice versa. Alternatively, the first segment can encode a first variant polypeptide of interest, and the second segment can encode a second variant polypeptide of interest that is different from the first variant polypeptide of interest. Preferably, the two segments encode the same polypeptide of interest (i.e., 100% identical).

[0586] Even when the two segments encode the same polypeptide of interest, the coding sequence for the polypeptide of interest in the first segment can differ from the coding sequence for the polypeptide of interest in the second segment. In some bidirectional constructs, the codon usage in the first coding sequence is the same as the codon usage in the second coding sequence. In other bidirectional constructs, the second coding sequence adopts a different codon usage from the codon usage of the first coding sequence in order to reduce hairpin formation. One or both of the coding sequences can be codon-optimized for expression in a host cell. In some bidirectional constructs, only one of the coding sequences is codon-optimized. In some bidirectional constructs, the first coding sequence is codon-optimized. In some bidirectional constructs, the second coding sequence is codon-optimized. In some bidirectional constructs, both coding sequences are codon-optimized. For example, the second polypeptide of interest coding sequence can be codon optimized or may use one or more alternative codons for one or more amino acids of the same polypeptide of interest (i.e., same amino acid sequence) encoded by the polypeptide of interest coding sequence in the first segment. An alternative codon as used herein refers to variations in codon usage for a given amino acid, and may or may not be a preferred or optimized codon (codon optimized) for a given expression system. Preferred codon usage, or codons that are well-tolerated in a given system of expression are known.

[0587] In one example, the second segment comprises a reverse complement of a polypeptide of interest coding sequence that adopts different codon usage from that of the polypeptide of interest coding sequence in the first segment in order to reduce hairpin formation. Such a reverse complement forms base pairs with fewer than all nucleotides of the coding sequence in the first segment, yet it optionally encodes the same polypeptide. In one example, the reverse complement sequence in the second segment is not substantially complementary (e.g., not more than 70% complementary) to the coding sequence in the first segment. In other cases, however, the second segment comprises a reverse complement sequence that is highly complementary (e.g., at least 90% complementary) to the coding sequence in the first segment.

[0588] The second segment can have any percentage of complementarity to the first segment. For example, the second segment sequence can have at least about 30%, at least about 35%, at least about 40%, at least about 45%, at least about 50%, at least about 55%, at least about 60%, at least about 65%, at least about 70%, at least about 75%, at least about 80%, at least about 85%, at least about 90%, at least about 95%, at least about 97%, or at least about 99% complementarity to the first segment. As another example, the second segment sequence can have less than about 30%, less than about 35%, less than about 40%, less than about 45%, less than about 50%, less than about 55%, less than about 60%, less than about 65%, less than about 70%, less than about 75%, less than about 80%, less than about 85%, less than about 90%, less than about 95%, less than about 97%, or less than about 99% complementarity to the first segment. The reverse complement of the second coding sequence can be, in some nucleic acid constructs, not substantially complementary (e.g., not more than 70% complementary) to the first coding sequence, not substantially complementary to a fragment of the first coding sequence, highly complementary (e.g., at least 90% complementary) to the first coding sequence, highly complementary to a fragment of the first coding sequence, about 50% to about 80% identical to the reverse complement of the first coding sequence, or about 60% to about 100% identical to the reverse complement of the first coding sequence.

[0589] The bidirectional constructs disclosed herein can be modified to include any suitable structural feature as needed for any particular use and/or that confers one or more desired function. For example, the bidirectional nucleic acid constructs disclosed herein need not comprise a homology arm and/or can be, for example, homology-independent donor constructs. Owing in part to the bidirectional function of the nucleic acid constructs, the bidirectional constructs can be inserted into a genomic locus in either direction as described herein to allow for efficient insertion and/or expression of the polypeptide of interest.

[0590] In some cases, the bidirectional nucleic acid construct does not comprise a promoter that drives the expression of the polypeptide of interest. For example, the expression of the polypeptide of interest can be driven by a promoter of the host cell (e.g., the endogenous ALB promoter when the transgene is integrated into a host cell's ALB locus). In other cases, the bidirectional nucleic acid construct can comprise one or more promoters operably linked to the coding sequences for the polypeptide of interest. That is, although not required for expression, the constructs disclosed herein may also include transcriptional or translational regulatory sequences such as promoters, enhancers, insulators, internal ribosome entry sites, additional sequences encoding peptides, and/or polyadenylation signals. Some bidirectional constructs can comprise a promoter that drives expression of the first polypeptide of interest coding sequence and/or the reverse complement of a promoter that drives expression of the reverse complement of the second polypeptide of interest coding sequence.

[0591] The bidirectional constructs disclosed herein can be modified to include or exclude any suitable structural feature as needed for any particular use and/or that confers one or more desired functions. For example, some bidirectional nucleic acid constructs disclosed herein do not comprise a homology arm. Owing in part to the bidirectional function of the nucleic acid construct, the bidirectional construct can be inserted into a genomic locus in either direction (orientation) as described herein to allow for efficient insertion and/or expression of a polypeptide of interest.

[0592] The bidirectional constructs can, in some cases, comprise one or more (e.g., two) polyadenylation tail sequences or polyadenylation signal sequences. In some bidirectional constructs, the first segment can comprise a polyadenylation signal sequence. In some bidirectional constructs, the second segment can comprise a polyadenylation signal sequence. In some bidirectional constructs, the first segment can comprise a first polyadenylation signal sequence, and the second segment can comprise a second polyadenylation signal sequence (e.g., a reverse complement of a polyadenylation signal sequence). In some bidirectional constructs, the first segment can comprise a first polyadenylation signal sequence located 3′ of the first coding sequence. In some bidirectional constructs, the second segment can comprise a reverse complement of a second polyadenylation signal sequence located 5′ of the reverse complement of the second coding sequence. In some bidirectional constructs, the first segment can comprise a first polyadenylation signal sequence located 3′ of the first coding sequence, and the second segment can comprise a reverse complement of a second polyadenylation signal sequence located 5′ of the reverse complement of the second coding sequence. The first and second polyadenylation signal sequences can be the same or different. In one example, the first and second polyadenylation signals are different. In a specific example, the first polyadenylation signal is a simian virus 40 (SV40) late polyadenylation signal (or a variant thereof), and the second polyadenylation signal is a bovine growth hormone (BGH) polyadenylation signal (or a variant thereof), or vice versa. For example, one polyadenylation signal can be an SV40 polyadenylation signal, and the other polyadenylation signal can be a BGH polyadenylation signal. In a specific example, one polyadenylation signal can comprise, consist essentially of, or consist of SEQ ID NO: 284, and the other polyadenylation signal can comprise, consist essentially of, or consist of SEQ ID NO: 285.

[0593] In one example, either polyadenylation signal can comprise a BGH polyadenylation signal. For example, the BGH polyadenylation signal can comprise, consist essentially of, or consist of SEQ ID NO: 858. In another example, the polyadenylation signal can comprise an SV40 polyadenylation signal. For example, the SV40 polyadenylation signal can be a unidirectional SV40 late polyadenylation signal. For example, the transcription terminator sequences that are present in the “early” inverse orientation of SV40 can be mutated (e.g., by mutating the reverse strand AAUAAA sequences to AAUCAA). The SV40 polyA is bidirectional, but the polyadenylation in the “late” orientation is more efficient than the polyadenylation in the “early” orientation. For example, the unidirectional SV40 late polyadenylation signal can comprise, consist essentially of, or consist of SEQ ID NO: 859. In another example, a synthetic polyadenylation signal can be used. For example, the synthetic polyadenylation signal can comprise, consist essentially of, or consist of SEQ ID NO: 860. In another example, two or more polyadenylation signals can be used in combination. For example, the polyadenylation signal can comprise a combination of a BGH polyadenylation signal and an SV40 polyadenylation signal (e.g., an SV40 late polyadenylation signal, such as a unidirectional SV40 late polyadenylation signal). For example, the polyadenylation signal can comprise a combination of a BGH polyadenylation signal and a unidirectional SV40 late polyadenylation signal. For example, the BGH polyadenylation signal can comprise, consist essentially of, or consist of SEQ ID NO: 858, and the unidirectional SV40 late polyadenylation signal can comprise, consist essentially of, or consist of SEQ ID NO: 859. In a specific example, the BGH polyadenylation signal can be upstream (5′) of the SV40 polyadenylation signal (e.g., unidirectional SV40 late polyadenylation signal). For example, the combined polyadenylation signal can comprise the sequence set forth in SEQ ID NO: 902. In another example, the polyadenylation signal can comprise a combination of a BGH polyadenylation signal and a synthetic polyadenylation signal. For example, the BGH polyadenylation signal can comprise, consist essentially of, or consist of SEQ ID NO: 858, and the synthetic polyadenylation signal can comprise, consist essentially of, or consist of SEQ ID NO: 860.

[0594] In some embodiments, a stuffer sequence can be used to increase the time between when RNA polymerase transcribes the polyA to the time when it transcribes the next splice acceptor. For example, the stuffer sequence can be used between two different polyadenylation signals (e.g., between a BGH polyadenylation signal and a synthetic polyadenylation signal. For example, the stuffer sequence can comprise, consist essentially of, or consist of SEQ ID NO: 861.

[0595] In some embodiments, MAZ elements that cause polymerase pausing are used in combination with a polyadenylation signal (e.g., a BGH polyadenylation signal or an SV40 polyadenylation signal). For example, one or more (e.g., at least 1, at least 2, at least 3, at least 4, or about 1 to about 4, about 2 to about 4, about 3 to about 4, or 1, 2, 3, or 4) MAZ elements can be used in combination with a polyadenylation signal. For example, the MAZ element can comprise, consist essentially of, or consist of SEQ ID NO: 862.

[0596] In some embodiments, unidirectional SV40 late polyadenylation signals are used. The SV40 polyA is bidirectional, but the polyadenylation in the “late” orientation is more efficient than the polyadenylation in the “early” orientation. The unidirectional SV40 late polyadenylation signals described herein are positioned in the “late” orientation, with the polyadenylation signals present in the “early” orientation mutated or inactivated. In some embodiments, each instance of the sequence AATAAA in the reverse strand is mutated in the unidirectional SV40 late polyadenylation signal. For example, the two conserved AATAAA poly(A) signals present in the SV40 “early” poly(A) to AATCAA. In some embodiments, the unidirectional SV40 late polyadenylation signal is at least 95%, at least 96%, at least 97%, at least 98%, or at least 99% identical to the sequence set forth in SEQ ID NO: 859. In some embodiments, the unidirectional SV40 late polyadenylation signal comprises, consists essentially of, or consists of the sequence set forth in SEQ ID NO: 859.

[0597] The unidirectional SV40 late polyadenylation signals can be used in combination with (e.g., in tandem with) one or more additional polyadenylation signals. Examples of transcription terminators that can be used include, for example, the human growth hormone (HGH) polyadenylation signal, the simian virus 40 (SV40) late polyadenylation signal, the rabbit beta-globin polyadenylation signal, the bovine growth hormone (BGH) polyadenylation signal, the phosphoglycerate kinase (PGK) polyadenylation signal, an AOX1 transcription termination sequence, a CYC1 transcription termination sequence, or any transcription termination sequence known to be suitable for regulating gene expression in eukaryotic cells. For example, the unidirectional SV40 late polyadenylation signals can be used in combination with (e.g., in tandem with) a bovine growth hormone (BGH) polyadenylation signal, optionally wherein the BGH polyadenylation signal is upstream of (5′ of) the unidirectional SV40 late polyadenylation signal. In some embodiments, the BGH polyadenylation signal is at least 95%, at least 96%, at least 97%, at least 98%, or at least 99% identical to the sequence set forth in SEQ ID NO: 858. In some embodiments, the BGH polyadenylation signal comprises, consists essentially of, or consists of the sequence set forth in SEQ ID NO: 858. In some embodiments, the combination of the BGH polyadenylation signal and the unidirectional SV40 late polyadenylation signal is at least 95%, at least 96%, at least 97%, at least 98%, or at least 99% identical to the sequence set forth in SEQ ID NO: 902. In some embodiments, the combination of the BGH polyadenylation signal and the unidirectional SV40 late polyadenylation signal comprises, consists essentially of, or consists of the sequence set forth in SEQ ID NO: 902.

[0598] In some embodiments, a stuffer sequence can be used to increase the time between when RNA polymerase transcribes the polyA to the time when it transcribes the next splice acceptor. For example, the stuffer sequence can be used between two different polyadenylation signals (e.g., between a BGH polyadenylation signal and a synthetic polyadenylation signal. For example, the stuffer sequence can comprise, consist essentially of, or consist of SEQ ID NO: 861.

[0599] In some embodiments, MAZ elements that cause polymerase pausing are used in combination with a polyadenylation signal (e.g., a BGH polyadenylation signal or an SV40 polyadenylation signal). For example, one or more (e.g., at least 1, at least 2, at least 3, at least 4, or about 1 to about 4, about 2 to about 4, about 3 to about 4, or 1, 2, 3, or 4) MAZ elements can be used in combination with a polyadenylation signal. For example, the MAZ element can comprise, consist essentially of, or consist of SEQ ID NO: 862.

[0600] In some bidirectional constructs, both the first segment and the second segment comprise a polyadenylation tail sequence. Methods of designing a suitable polyadenylation tail sequence are known. For example, in some bidirectional constructs, one or both of the first and second segment comprises a polyadenylation tail sequence and/or a polyadenylation signal sequence downstream of an open reading frame (i.e., a polyadenylation tail sequence and/or a polyadenylation signal sequence 3′ of a coding sequence, or a reverse complement of a polyadenylation tail sequence and/or a polyadenylation signal sequence 5′ of a reverse complement of a coding sequence). The polyadenylation tail sequence can be encoded, for example, as a “poly-A” stretch downstream of the polypeptide of interest coding sequence (or other protein coding sequence) in the first and/or second segment. A poly-A tail can comprise, for example, at least 20, 30, 40, 50, 60, 70, 80, 90, or 100 adenines, and optionally up to 300 adenines. In a specific example, the poly-A tail comprises 95, 96, 97, 98, 99, or 100 adenine nucleotides. Methods of designing a suitable polyadenylation tail sequence and/or polyadenylation signal sequence are well known. For example, the polyadenylation signal sequence AAUAAA is commonly used in mammalian systems, although variants such as UAUAAA or AU/GUAAA have been identified. See, e.g., Proudfoot (2011) Genes & Dev. 25(17):1770-82, herein incorporated by reference in its entirety for all purposes. In some bidirectional constructs, a single bidirectional terminator can be used to terminate RNA polymerase transcription in either the sense or the antisense direction (i.e., to terminate RNA polymerase transcription from both the first segment and the second segment). Examples of bidirectional terminators include the ARO4, TRP1, TRP4, ADH1, CYC1, GAL1, GAL7, and GAL10 terminators.

[0601] The bidirectional constructs can, in some cases, comprise one or more (e.g., two) splice acceptor sites. In some bidirectional constructs, the first segment can comprise a splice acceptor site. In some bidirectional constructs, the second segment can comprise a splice acceptor site. In some bidirectional constructs, the first segment can comprise a first splice acceptor site, and the second segment can comprise a second splice acceptor site (e.g., a reverse complement of a splice acceptor site). In some bidirectional constructs, the first segment comprises a first splice acceptor site located 5′ of the first coding sequence. In some bidirectional constructs, the second segment comprises a reverse complement of a second splice acceptor site located 3′ of the reverse complement of the second coding sequence. In some bidirectional constructs, the first segment comprises a first splice acceptor site located 5′ of the first coding sequence, and the second segment comprises a reverse complement of a second splice acceptor site located 3′ of the reverse complement of the second coding sequence. The first and second splice acceptor sites can be the same or different. In a specific example, both splice acceptors are mouse Alb exon 2 splice acceptors. In a specific example, both splice acceptors can comprise, consist essentially of, or consist of SEQ ID NO: 286.

[0602] A bidirectional construct may comprise a first coding sequence that encodes a first coding sequence linked to a splice acceptor and a reverse complement of a second coding sequence operably linked to the reverse complement of a splice acceptor. The bidirectional constructs disclosed herein can also comprise a splice acceptor site on either or both ends of the construct, or splice acceptor sites in both the first segment and the second segment (e.g., a splice acceptor site 5′ of a coding sequence, or a reverse complement of a splice acceptor 3′ of a reverse complement of a coding sequence). The splice acceptor site can, for example, comprise NAG or consist of NAG. In a specific example, the splice acceptor is an ALB splice acceptor (e.g., an ALB splice acceptor used in the splicing together of exons 1 and 2 of ALB (i.e., ALB exon 2 splice acceptor)). For example, such a splice acceptor can be derived from the human ALB gene. In another example, the splice acceptor can be derived from the mouse Alb gene (e.g., an ALB splice acceptor used in the splicing together of exons 1 and 2 of mouse Alb (i.e., mouse Alb exon 2 splice acceptor)). In another example, the splice acceptor is a splice acceptor from a gene encoding the polypeptide of interest. Additional suitable splice acceptor sites useful in eukaryotes, including artificial splice acceptors, are known. See, e.g., Shapiro et al. (1987) Nucleic Acids Res. 15:7155-7174 and Burset et al. (2001) Nucleic Acids Res. 29:255-259, each of which is herein incorporated by reference in its entirety for all purposes. The splice acceptors used in a bidirectional construct may be the same or different. In a specific example, both splice acceptors are mouse Alb exon 2 splice acceptors.

[0603] The bidirectional constructs can be circular or linear. For example, a bidirectional construct can be linear. The first and second segments can be joined in a linear manner through a linker sequence. For example, the 5′ end of the second segment that comprises a reverse complement sequence can be linked to the 3′ end of the first segment. Alternatively, the 5′ end of the first segment can be linked to the 3′ end of the second segment that comprises a reverse complement sequence. The linker can be any suitable length. For example, the linker can be between about 5 to about 2000 nucleotides in length. As an example, the linker sequence can be about 1, about 2, about 3, about 4, about 5, about 6, about 7, about 8, about 9, about 10, about 11, about 12, about 13, about 14, about 15, about 16, about 17, about 18, about 19, about 20, about 25, about 30, about 35, about 40, about 45, about 50, about 55, about 60, about 65, about 70, about 75, about 80, about 85, about 90, about 95, about 100, about 150, about 200, about 250, about 300, about 500, about 1000, about 1500, about 2000, or more nucleotides in length. Other structural elements in addition to, or instead of, a linker sequence, can also be inserted between the first and second segments.

[0604] The bidirectional constructs disclosed herein can be DNA or RNA, single-stranded, double-stranded, or partially single-stranded and partially double-stranded. For example, the constructs can be single- or double-stranded DNA. In some embodiments, the nucleic acid can be modified (e.g., using nucleoside analogs), as described herein. In a specific example, the bidirectional construct is single-stranded (e.g., single-stranded DNA).

[0605] The bidirectional constructs disclosed herein can be modified on either or both ends to include one or more suitable structural features as needed and/or to confer one or more functional benefit. For example, structural modifications can vary depending on the method(s) used to deliver the constructs disclosed herein to a host cell (e.g., use of viral vector delivery or packaging into lipid nanoparticles for delivery). Such modifications include, for example, terminal structures such as inverted terminal repeats (ITR), hairpin, loops, and other structures such as toroids. For example, the constructs disclosed herein can comprise one, two, or three ITRs or can comprise no more than two ITRs. Various methods of structural modifications are known.

[0606] Similarly, one or both ends of the construct can be protected (e.g., from exonucleolytic degradation) by known methods. For example, one or more dideoxynucleotide residues can be added to the 3′ terminus of a linear molecule and/or self-complementary oligonucleotides can be ligated to one or both ends. See, e.g., Chang et al. (1987) Proc. Natl. Acad. Sci. U.S.A. 84:4959-4963 and Nehls et al. (1996) Science 272:886-889, each of which is herein incorporated by reference in its entirety for all purposes. Additional methods for protecting the constructs from degradation include, but are not limited to, addition of terminal amino group(s) and the use of modified internucleotide linkages such as, for example, phosphorothioates, phosphoramidates, and O-methyl ribose or deoxyribose residues.

[0607] As disclosed in more detail herein, the bidirectional constructs disclosed herein can be introduced into a cell as part of a vector having additional sequences such as, for example, replication origins, promoters, and genes encoding antibiotic resistance. The constructs can be introduced as a naked nucleic acid, can be introduced as a nucleic acid complexed with an agent such as a liposome, polymer, or poloxamer, or can be delivered by viral vectors (e.g., adenovirus, AAV, herpesvirus, retrovirus, lentivirus).

[0608] In an exemplary bidirectional construct, the second segment is located 3′ of the first segment, the first polypeptide of interest coding sequence and the second polypeptide of interest coding sequence both encode the same human polypeptide of interest, the second polypeptide of interest coding sequence adopts a different codon usage from the codon usage of the first polypeptide of interest coding sequence, the first segment comprises a first polyadenylation signal sequence located 3′ of the first polypeptide of interest coding sequence, the second segment comprises a reverse complement of a second polyadenylation signal sequence located 5′ of the reverse complement of the second polypeptide of interest coding sequence, the first segment comprises a first splice acceptor site located 5′ of the first polypeptide of interest coding sequence, the second segment comprises a reverse complement of a second splice acceptor site located 3′ of the reverse complement of the second polypeptide of interest coding sequence, the nucleic acid construct does not comprise a promoter that drives expression of the first polypeptide of interest or the second polypeptide of interest, and optionally the nucleic acid construct does not comprise a homology arm.

### (6) Unidirectional Constructs

[0609] The nucleic acid constructs disclosed herein can be unidirectional constructs. When specific unidirectional construct sequences are disclosed herein, they are meant to encompass the sequence disclosed or the reverse complement of the sequence. For example, if a unidirectional construct disclosed herein consists of the hypothetical sequence 5′-CTGGACCGA-3′, it is also meant to encompass the reverse complement of that sequence (5′-TCGGTCCAG-3′). Likewise, when unidirectional construct elements are disclosed herein in a specific 5′ to 3′ order, they are also meant to encompass the reverse complement of the order of those elements. One reason for this is that, in many embodiments disclosed herein, the unidirectional constructs are part of a single-stranded recombinant AAV vector. Single-stranded AAV genomes are packaged as either sense (plus-stranded) or anti-sense (minus-stranded genomes), and single-stranded AAV genomes of + and − polarity are packaged with equal frequency into mature rAAV virions. See, e.g., LING et al. (2015) J. Mol. Genet. Med. 9(3):175, Zhou et al. (2008) Mol. Ther. 16(3):494-499, and Samulski et al. (1987) J. Virol. 61:3096-3101, each of which is herein incorporated by reference in its entirety for all purposes.

[0610] In the unidirectional constructs, the coding sequence for the polypeptide of interest can be codon-optimized for expression in a host cell. For example, the coding sequence can be codon optimized or may use one or more alternative codons for one or more amino acids of the polypeptide of interest (i.e., same amino acid sequence). An alternative codon as used herein refers to variations in codon usage for a given amino acid, and may or may not be a preferred or optimized codon (codon optimized) for a given expression system. Preferred codon usage, or codons that are well-tolerated in a given system of expression, are known.

[0611] The unidirectional constructs disclosed herein can be modified to include any suitable structural feature as needed for any particular use and/or that confers one or more desired functions. For example, the unidirectional nucleic acid constructs disclosed herein need not comprise a homology arm and/or can be, for example, homology-independent donor constructs.

[0612] In some cases, the unidirectional nucleic acid construct does not comprise a promoter that drives the expression of polypeptide of interest. For example, the expression of the polypeptide of interest can be driven by a promoter of the host cell (e.g., the endogenous ALB promoter when the transgene is integrated into a host cell's ALB locus). In other cases, the unidirectional nucleic acid construct can comprise one or more promoters operably linked to the coding sequence for the polypeptide of interest. That is, although not required for expression, the constructs disclosed herein may also include transcriptional or translational regulatory sequences such as promoters, enhancers, insulators, internal ribosome entry sites, additional sequences encoding peptides, and/or polyadenylation signals. Some unidirectional constructs can comprise a promoter that drives expression of the coding sequence for the polypeptide of interest.

[0613] The unidirectional constructs can, in some cases, comprise one or more polyadenylation tail sequences or polyadenylation signal sequences. Some unidirectional constructs can comprise a polyadenylation signal sequence located 3′ of the coding sequence for the polypeptide of interest. In a specific example, the polyadenylation signal is a simian virus 40 (SV40) late polyadenylation signal (or a variant thereof). In another specific example, the polyadenylation signal is a bovine growth hormone (BGH) polyadenylation signal (or a variant thereof). In another specific example, the polyadenylation signal is a BGH polyadenylation signal. For example, the polyadenylation signal can be an SV40 polyadenylation signal or a BGH polyadenylation signal. In a specific example, the polyadenylation signal can comprise, consist essentially of, or consist of SEQ ID NO: 284. In another specific example, the polyadenylation signal can comprise, consist essentially of, or consist of SEQ ID NO: 285.

[0614] In one example, the polyadenylation signal can comprise a BGH polyadenylation signal. For example, the BGH polyadenylation signal can comprise, consist essentially of, or consist of SEQ ID NO: 858. In another example, the polyadenylation signal can comprise an SV40 polyadenylation signal. For example, the SV40 polyadenylation signal can be a unidirectional SV40 late polyadenylation signal. For example, the transcription terminator sequences that are present in the “early” inverse orientation of SV40 can be mutated (e.g., by mutating the reverse strand AAUAAA sequences to AAUCAA). The SV40 polyA is bidirectional, but the polyadenylation in the “late” orientation is more efficient than the polyadenylation in the “early” orientation. For example, the unidirectional SV40 late polyadenylation signal can comprise, consist essentially of, or consist of SEQ ID NO: 859. In another example, a synthetic polyadenylation signal can be used. For example, the synthetic polyadenylation signal can comprise, consist essentially of, or consist of SEQ ID NO: 860. In another example, two or more polyadenylation signals can be used in combination. For example, the polyadenylation signal can comprise a combination of a BGH polyadenylation signal and an SV40 polyadenylation signal (e.g., an SV40 late polyadenylation signal, such as a unidirectional SV40 late polyadenylation signal). For example, the polyadenylation signal can comprise a combination of a BGH polyadenylation signal and a unidirectional SV40 late polyadenylation signal. For example, the BGH polyadenylation signal can comprise, consist essentially of, or consist of SEQ ID NO: 858, and the unidirectional SV40 late polyadenylation signal can comprise, consist essentially of, or consist of SEQ ID NO: 859. In a specific example, the BGH polyadenylation signal can be upstream (5′) of the SV40 polyadenylation signal (e.g., unidirectional SV40 late polyadenylation signal). For example, the combined polyadenylation signal can comprise the sequence set forth in SEQ ID NO: 902. In another example, the polyadenylation signal can comprise a combination of a BGH polyadenylation signal and a synthetic polyadenylation signal. For example, the BGH polyadenylation signal can comprise, consist essentially of, or consist of SEQ ID NO: 858, and the synthetic polyadenylation signal can comprise, consist essentially of, or consist of SEQ ID NO: 860.

[0615] In some embodiments, a stuffer sequence can be used to increase the time between when RNA polymerase transcribes the polyA to the time when it transcribes the next splice acceptor. For example, the stuffer sequence can be used between two different polyadenylation signals (e.g., between a BGH polyadenylation signal and a synthetic polyadenylation signal. For example, the stuffer sequence can comprise, consist essentially of, or consist of SEQ ID NO: 861.

[0616] In some embodiments, MAZ elements that cause polymerase pausing are used in combination with a polyadenylation signal (e.g., a BGH polyadenylation signal or an SV40 polyadenylation signal). For example, one or more (e.g., at least 1, at least 2, at least 3, at least 4, or about 1 to about 4, about 2 to about 4, about 3 to about 4, or 1, 2, 3, or 4) MAZ elements can be used in combination with a polyadenylation signal. For example, the MAZ element can comprise, consist essentially of, or consist of SEQ ID NO: 862.

[0617] In some embodiments, unidirectional SV40 late polyadenylation signals are used. The SV40 polyA is bidirectional, but the polyadenylation in the “late” orientation is more efficient than the polyadenylation in the “early” orientation. The unidirectional SV40 late polyadenylation signals described herein are positioned in the “late” orientation, with the polyadenylation signals present in the “early” orientation mutated or inactivated. In some embodiments, each instance of the sequence AATAAA in the reverse strand is mutated in the unidirectional SV40 late polyadenylation signal. For example, the two conserved AATAAA poly(A) signals present in the SV40 “early” poly(A) to AATCAA. In some embodiments, the unidirectional SV40 late polyadenylation signal is at least 95%, at least 96%, at least 97%, at least 98%, or at least 99% identical to the sequence set forth in SEQ ID NO: 859. In some embodiments, the unidirectional SV40 late polyadenylation signal comprises, consists essentially of, or consists of the sequence set forth in SEQ ID NO: 859.

[0618] The unidirectional SV40 late polyadenylation signals can be used in combination with (e.g., in tandem with) one or more additional polyadenylation signals. Examples of transcription terminators that can be used include, for example, the human growth hormone (HGH) polyadenylation signal, the simian virus 40 (SV40) late polyadenylation signal, the rabbit beta-globin polyadenylation signal, the bovine growth hormone (BGH) polyadenylation signal, the phosphoglycerate kinase (PGK) polyadenylation signal, an AOX1 transcription termination sequence, a CYC1 transcription termination sequence, or any transcription termination sequence known to be suitable for regulating gene expression in eukaryotic cells. For example, the unidirectional SV40 late polyadenylation signals can be used in combination with (e.g., in tandem with) a bovine growth hormone (BGH) polyadenylation signal, optionally wherein the BGH polyadenylation signal is upstream of (5′ of) the unidirectional SV40 late polyadenylation signal. In some embodiments, the BGH polyadenylation signal is at least 95%, at least 96%, at least 97%, at least 98%, or at least 99% identical to the sequence set forth in SEQ ID NO: 858. In some embodiments, the BGH polyadenylation signal comprises, consists essentially of, or consists of the sequence set forth in SEQ ID NO: 858. In some embodiments, the combination of the BGH polyadenylation signal and the unidirectional SV40 late polyadenylation signal is at least 95%, at least 96%, at least 97%, at least 98%, or at least 99% identical to the sequence set forth in SEQ ID NO: 902. In some embodiments, the combination of the BGH polyadenylation signal and the unidirectional SV40 late polyadenylation signal comprises, consists essentially of, or consists of the sequence set forth in SEQ ID NO: 902.

[0619] In some embodiments, a stuffer sequence can be used to increase the time between when RNA polymerase transcribes the polyA to the time when it transcribes the next splice acceptor. For example, the stuffer sequence can be used between two different polyadenylation signals (e.g., between a BGH polyadenylation signal and a synthetic polyadenylation signal. For example, the stuffer sequence can comprise, consist essentially of, or consist of SEQ ID NO: 861.

[0620] In some embodiments, MAZ elements that cause polymerase pausing are used in combination with a polyadenylation signal (e.g., a BGH polyadenylation signal or an SV40 polyadenylation signal). For example, one or more (e.g., at least 1, at least 2, at least 3, at least 4, or about 1 to about 4, about 2 to about 4, about 3 to about 4, or 1, 2, 3, or 4) MAZ elements can be used in combination with a polyadenylation signal. For example, the MAZ element can comprise, consist essentially of, or consist of SEQ ID NO: 862.

[0621] Methods of designing a suitable polyadenylation tail sequence are known. For example, some unidirectional constructs comprise a polyadenylation tail sequence and/or a polyadenylation signal sequence downstream of an open reading frame (i.e., a polyadenylation tail sequence and/or a polyadenylation signal sequence 3′ of a coding sequence). The polyadenylation tail sequence can be encoded, for example, as a “poly-A” stretch downstream of the coding sequence for the polypeptide of interest (or other protein coding sequence) in the first and/or second segment. A poly-A tail can comprise, for example, at least 20, 30, 40, 50, 60, 70, 80, 90, or 100 adenines, and optionally up to 300 adenines. In a specific example, the poly-A tail comprises 95, 96, 97, 98, 99, or 100 adenine nucleotides. Methods of designing a suitable polyadenylation tail sequence and/or polyadenylation signal sequence are well known. For example, the polyadenylation signal sequence AAUAAA is commonly used in mammalian systems, although variants such as UAUAAA or AU/GUAAA have been identified. See, e.g., Proudfoot (2011) Genes & Dev. 25(17):1770-82, herein incorporated by reference in its entirety for all purposes.

[0622] The unidirectional constructs can, in some cases, comprise one or more splice acceptor sites. Some unidirectional constructs comprise a splice acceptor site located 5′ of the coding sequence for the polypeptide of interest. In a specific example, the splice acceptor is a mouse Alb exon 2 splice acceptor. In a specific example, the splice acceptor can comprise, consist essentially of, or consist of SEQ ID NO: 286.

[0623] The splice acceptor site can, for example, comprise NAG or consist of NAG. In a specific example, the splice acceptor is an ALB splice acceptor (e.g., an ALB splice acceptor used in the splicing together of exons 1 and 2 of ALB (i.e., ALB exon 2 splice acceptor)). For example, such a splice acceptor can be derived from the human ALB gene. In another example, the splice acceptor can be derived from the mouse Alb gene (e.g., an ALB splice acceptor used in the splicing together of exons 1 and 2 of mouse Alb (i.e., mouse Alb exon 2 splice acceptor)). In another example, the splice acceptor is a splice acceptor from the gene encoding the polypeptide of interest. Additional suitable splice acceptor sites useful in eukaryotes, including artificial splice acceptors, are known. See, e.g., Shapiro et al. (1987) Nucleic Acids Res. 15:7155-7174 and Burset et al. (2001) Nucleic Acids Res. 29:255-259, each of which is herein incorporated by reference in its entirety for all purposes.

[0624] The unidirectional constructs can be circular or linear. For example, a unidirectional construct can be linear.

[0625] The unidirectional constructs disclosed herein can be DNA or RNA, single-stranded, double-stranded, or partially single-stranded and partially double-stranded. For example, the constructs can be single- or double-stranded DNA. In some embodiments, the nucleic acid can be modified (e.g., using nucleoside analogs), as described herein. In a specific example, the unidirectional construct is single-stranded (e.g., single-stranded DNA).

[0626] The unidirectional constructs disclosed herein can be modified on either or both ends to include one or more suitable structural features as needed and/or to confer one or more functional benefit. For example, structural modifications can vary depending on the method(s) used to deliver the constructs disclosed herein to a host cell (e.g., use of viral vector delivery or packaging into lipid nanoparticles for delivery). Such modifications include, for example, terminal structures such as inverted terminal repeats (ITR), hairpin, loops, and other structures such as toroids. For example, the constructs disclosed herein can comprise one, two, or three ITRs or can comprise no more than two ITRs. Various methods of structural modifications are known.

[0627] Similarly, one or both ends of the construct can be protected (e.g., from exonucleolytic degradation) by known methods. For example, one or more dideoxynucleotide residues can be added to the 3′ terminus of a linear molecule and/or self-complementary oligonucleotides can be ligated to one or both ends. See, e.g., Chang et al. (1987) Proc. Natl. Acad. Sci. U.S.A. 84:4959-4963 and Nehls et al. (1996) Science 272:886-889, each of which is herein incorporated by reference in its entirety for all purposes. Additional methods for protecting the constructs from degradation include, but are not limited to, addition of terminal amino group(s) and the use of modified internucleotide linkages such as, for example, phosphorothioates, phosphoramidates, and O-methyl ribose or deoxyribose residues.

[0628] As disclosed in more detail herein, the unidirectional constructs disclosed herein can be introduced into a cell as part of a vector having additional sequences such as, for example, replication origins, promoters, and genes encoding antibiotic resistance. The constructs can be introduced as a naked nucleic acid, can be introduced as a nucleic acid complexed with an agent such as a liposome, polymer, or poloxamer, or can be delivered by viral vectors (e.g., adenovirus, AAV, herpesvirus, retrovirus, lentivirus).

[0629] In an exemplary unidirectional construct, the construct comprises a polyadenylation signal sequence located 3′ of the coding sequence for the polypeptide of interest, the construct comprises a splice acceptor site located 5′ of the coding sequence for the polypeptide of interest, and the nucleic acid construct does not comprise a promoter that drives expression of the polypeptide of interest, and optionally the nucleic acid construct does not comprise a homology arm.

### (7) F9 Nucleic Acid Constructs

[0630] The F9 nucleic acid constructs disclosed herein can be bidirectional constructs. Such bidirectional constructs can allow for enhanced insertion and expression of encoded FIX. When used in combination with a nuclease agent (e.g., CRISPR/Cas system, zinc finger nuclease (ZFN) system; transcription activator-like effector nuclease (TALEN) system) as described herein, the bidirectionality of the nucleic acid construct allows the construct to be inserted in either direction (i.e., is not limited to insertion in one direction) within a target genomic locus, allowing the expression of FIX when inserted in either orientation, thereby enhancing expression efficiency, as exemplified herein. For example, when used in combination with a nuclease agent (e.g., CRISPR/Cas system, zinc finger nuclease (ZFN) system; transcription activator-like effector nuclease (TALEN) system) as described herein, the bidirectionality of the nucleic acid construct allows the construct to be inserted in either direction (i.e., is not limited to insertion in one direction) within a cleavage site or target insertion site, allowing the expression of FIX when inserted in either orientation, thereby enhancing insertion and expression efficiency, as exemplified herein.

[0631] A bidirectional construct as disclosed herein can comprise at least two nucleic acid segments, wherein a first segment comprises a first FIX coding sequence, and a second segment comprises the reverse complement of a second FIX coding sequence, or vice versa. However, other bidirectional constructs disclosed herein can comprise at least two nucleic acid segments, wherein the first segment comprises a FIX coding sequence, and the second segment comprises the reverse complement of a coding sequence for another protein, or vice versa. A reverse complement refers to a sequence that is a complement sequence of a reference sequence, wherein the complement sequence is written in the reverse orientation. For example, for a hypothetical sequence 5′-CTGGACCGA-3′, the perfect complement sequence is 3′-GACCTGGCT-5′, and the perfect reverse complement is written 5′-TCGGTCCAG-3′. A reverse complement sequence need not be perfect and may still encode the same polypeptide or a similar polypeptide as the reference sequence. Due to codon usage redundancy, a reverse complement can diverge from a reference sequence that encodes the same polypeptide. The coding sequences can optionally comprise one or more additional sequences, such as sequences encoding amino- or carboxy-terminal amino acid sequences such as a signal sequence, label sequence (e.g., HiBit), or heterologous functional sequence (e.g., nuclear localization sequence (NLS) or self-cleaving peptide) linked to the FIX or other protein.

[0632] When specific bidirectional construct sequences are disclosed herein, they are meant to encompass the sequence disclosed or the reverse complement of the sequence. For example, if a bidirectional construct disclosed herein consists of the hypothetical sequence 5′-CTGGACCGA-3′, it is also meant to encompass the reverse complement of that sequence (5′-TCGGTCCAG-3′). Likewise, when bidirectional construct elements are disclosed herein in a specific 5′ to 3′ order, they are also meant to encompass the reverse complement of the order of those elements. For example, if a bidirectional construct is disclosed herein that comprises from 5′ to 3′ a first splice acceptor, a first coding sequence, a first terminator, a reverse complement of a second terminator, a reverse complement of a second coding sequence, and a reverse complement of a second splice acceptor, it is also meant to encompass a construct comprising from 5′ to 3′ the second splice acceptor, the second coding sequence, the second terminator, a reverse complement of the first terminator, a reverse complement of the first coding sequence, and a reverse complement of the first splice acceptor. One reason for this is that, in many embodiments disclosed herein, the bidirectional constructs are part of a single-stranded recombinant AAV vector. Single-stranded AAV genomes are packaged as either sense (plus-stranded) or anti-sense (minus-stranded genomes), and single-stranded AAV genomes of + and − polarity are packaged with equal frequency into mature rAAV virions. See, e.g., LING et al. (2015) J. Mol. Genet. Med. 9(3):175, Zhou et al. (2008) Mol. Ther. 16(3):494-499, and Samulski et al. (1987) J. Virol. 61:3096-3101, each of which is herein incorporated by reference in its entirety for all purposes.

[0633] When the at least two segments both encode FIX, the at least two segments can encode the same FIX protein or different FIX proteins. The different FIX proteins can be at least about 90%, at least about 95%, at least about 96%, at least about 97%, at least about 98%, at least about 99%, or at least about 99.5% identical. For example, the first segment can encode a wild type FIX protein or fragment thereof, and the second segment can encode a variant FIX protein or fragment thereof, or vice versa. Alternatively, the first segment can encode a first variant FIX protein, and the second segment can encode a second variant FIX protein that is different from the first variant FIX protein. Preferably, the two segments encode the same FIX protein (i.e., 100% identical).

[0634] Even when the two segments encode the same FIX protein, the FIX coding sequence in the first segment can differ from the FIX coding sequence in the second segment. In some bidirectional constructs, the codon usage in the first coding sequence is the same as the codon usage in the second coding sequence. In other bidirectional constructs, the second coding sequence adopts a different codon usage from the codon usage of the first coding sequence in order to reduce hairpin formation. One or both of the coding sequences can be codon-optimized for expression in a host cell. In some bidirectional constructs, only one of the coding sequences is codon-optimized. In some bidirectional constructs, the first coding sequence is codon-optimized. In some bidirectional constructs, the second coding sequence is codon-optimized. In some bidirectional constructs, both coding sequences are codon-optimized. For example, the second FIX coding sequence can be codon optimized or may use one or more alternative codons for one or more amino acids of the same FIX (i.e., same amino acid sequence) encoded by the FIX coding sequence in the first segment. An alternative codon as used herein refers to variations in codon usage for a given amino acid, and may or may not be a preferred or optimized codon (codon optimized) for a given expression system. Preferred codon usage, or codons that are well-tolerated in a given system of expression are known.

[0635] In one example, the second segment comprises a reverse complement of a FIX coding sequence that adopts different codon usage from that of the FIX coding sequence in the first segment in order to reduce hairpin formation. Such a reverse complement forms base pairs with fewer than all nucleotides of the coding sequence in the first segment, yet it optionally encodes the same polypeptide. In one example, the reverse complement sequence in the second segment is not substantially complementary (e.g., not more than 70% complementary) to the coding sequence in the first segment. In other cases, however, the second segment comprises a reverse complement sequence that is highly complementary (e.g., at least 90% complementary) to the coding sequence in the first segment.

[0636] The second segment can have any percentage of complementarity to the first segment. For example, the second segment sequence can have at least about 30%, at least about 35%, at least about 40%, at least about 45%, at least about 50%, at least about 55%, at least about 60%, at least about 65%, at least about 70%, at least about 75%, at least about 80%, at least about 85%, at least about 90%, at least about 95%, at least about 97%, or at least about 99% complementarity to the first segment. As another example, the second segment sequence can have less than about 30%, less than about 35%, less than about 40%, less than about 45%, less than about 50%, less than about 55%, less than about 60%, less than about 65%, less than about 70%, less than about 75%, less than about 80%, less than about 85%, less than about 90%, less than about 95%, less than about 97%, or less than about 99% complementarity to the first segment. The reverse complement of the second coding sequence can be, in some nucleic acid constructs, not substantially complementary (e.g., not more than 70% complementary) to the first coding sequence, not substantially complementary to a fragment of the first coding sequence, highly complementary (e.g., at least 90% complementary) to the first coding sequence, highly complementary to a fragment of the first coding sequence, about 50% to about 80% identical to the reverse complement of the first coding sequence, or about 60% to about 100% identical to the reverse complement of the first coding sequence.

[0637] The bidirectional constructs disclosed herein can be modified to include any suitable structural feature as needed for any particular use and/or that confers one or more desired function. For example, the bidirectional nucleic acid constructs disclosed herein need not comprise a homology arm and/or can be, for example, homology-independent donor constructs. Owing in part to the bidirectional function of the nucleic acid constructs, the bidirectional constructs can be inserted into a genomic locus in either direction as described herein to allow for efficient insertion and/or expression of FIX.

[0638] In some cases, the bidirectional nucleic acid construct does not comprise a promoter that drives the expression of FIX. For example, the expression of FIX can be driven by a promoter of the host cell (e.g., the endogenous ALB promoter when the transgene is integrated into a host cell's ALB locus). In other cases, the bidirectional nucleic acid construct can comprise one or more promoters operably linked to the FIX coding sequences. That is, although not required for expression, the constructs disclosed herein may also include transcriptional or translational regulatory sequences such as promoters, enhancers, insulators, internal ribosome entry sites, additional sequences encoding peptides, and/or polyadenylation signals. Some bidirectional constructs can comprise a promoter that drives expression of the first FIX coding sequence and/or the reverse complement of a promoter that drives expression of the reverse complement of the second FIX coding sequence.

[0639] The bidirectional constructs disclosed herein can be modified to include or exclude any suitable structural feature as needed for any particular use and/or that confers one or more desired functions. For example, some bidirectional nucleic acid constructs disclosed herein do not comprise a homology arm. Owing in part to the bidirectional function of the nucleic acid construct, the bidirectional construct can be inserted into a genomic locus in either direction (orientation) as described herein to allow for efficient insertion and/or expression of a heterologous FIX.

[0640] The bidirectional constructs can, in some cases, comprise one or more (e.g., two) polyadenylation tail sequences or polyadenylation signal sequences. In some bidirectional constructs, the first segment can comprise a polyadenylation signal sequence. In some bidirectional constructs, the second segment can comprise a polyadenylation signal sequence. In some bidirectional constructs, the first segment can comprise a first polyadenylation signal sequence, and the second segment can comprise a second polyadenylation signal sequence (e.g., a reverse complement of a polyadenylation signal sequence). In some bidirectional constructs, the first segment can comprise a first polyadenylation signal sequence located 3′ of the first coding sequence. In some bidirectional constructs, the second segment can comprise a reverse complement of a second polyadenylation signal sequence located 5′ of the reverse complement of the second coding sequence. In some bidirectional constructs, the first segment can comprise a first polyadenylation signal sequence located 3′ of the first coding sequence, and the second segment can comprise a reverse complement of a second polyadenylation signal sequence located 5′ of the reverse complement of the second coding sequence. The first and second polyadenylation signal sequences can be the same or different. In one example, the first and second polyadenylation signals are different. In a specific example, the first polyadenylation signal is a simian virus 40 (SV40) late polyadenylation signal (or a variant thereof), and the second polyadenylation signal is a bovine growth hormone (BGH) polyadenylation signal (or a variant thereof), or vice versa. For example, one polyadenylation signal can be an SV40 polyadenylation signal, and the other polyadenylation signal can be a CpG-depleted BGH polyadenylation signal. In a specific example, one polyadenylation signal can comprise, consist essentially of, or consist of SEQ ID NO: 98, and the other polyadenylation signal can comprise, consist essentially of, or consist of SEQ ID NO: 99.

[0641] In some bidirectional constructs, both the first segment and the second segment comprise a polyadenylation tail sequence. Methods of designing a suitable polyadenylation tail sequence are known. For example, in some bidirectional constructs, one or both of the first and second segment comprises a polyadenylation tail sequence and/or a polyadenylation signal sequence downstream of an open reading frame (i.e., a polyadenylation tail sequence and/or a polyadenylation signal sequence 3′ of a coding sequence, or a reverse complement of a polyadenylation tail sequence and/or a polyadenylation signal sequence 5′ of a reverse complement of a coding sequence). The polyadenylation tail sequence can be encoded, for example, as a “poly-A” stretch downstream of the FIX coding sequence (or other protein coding sequence) in the first and/or second segment. A poly-A tail can comprise, for example, at least 20, 30, 40, 50, 60, 70, 80, 90, or 100 adenines, and optionally up to 300 adenines. In a specific example, the poly-A tail comprises 95, 96, 97, 98, 99, or 100 adenine nucleotides. Methods of designing a suitable polyadenylation tail sequence and/or polyadenylation signal sequence are well known. For example, the polyadenylation signal sequence AAUAAA is commonly used in mammalian systems, although variants such as UAUAAA or AU/GUAAA have been identified. See, e.g., Proudfoot (2011) Genes & Dev. 25(17):1770-82, herein incorporated by reference in its entirety for all purposes. In some bidirectional constructs, a single bidirectional terminator can be used to terminate RNA polymerase transcription in either the sense or the antisense direction (i.e., to terminate RNA polymerase transcription from both the first segment and the second segment). Examples of bidirectional terminators include the ARO4, TRP1, TRP4, ADH1, CYC1, GAL1, GAL7, and GAL10 terminators.

[0642] The bidirectional constructs can, in some cases, comprise one or more (e.g., two) splice acceptor sites. In some bidirectional constructs, the first segment can comprise a splice acceptor site. In some bidirectional constructs, the second segment can comprise a splice acceptor site. In some bidirectional constructs, the first segment can comprise a first splice acceptor site, and the second segment can comprise a second splice acceptor site (e.g., a reverse complement of a splice acceptor site). In some bidirectional constructs, the first segment comprises a first splice acceptor site located 5′ of the first coding sequence. In some bidirectional constructs, the second segment comprises a reverse complement of a second splice acceptor site located 3′ of the reverse complement of the second coding sequence. In some bidirectional constructs, the first segment comprises a first splice acceptor site located 5′ of the first coding sequence, and the second segment comprises a reverse complement of a second splice acceptor site located 3′ of the reverse complement of the second coding sequence. The first and second splice acceptor sites can be the same or different. In a specific example, both splice acceptors are mouse Alb exon 2 splice acceptors. In a specific example, both splice acceptors can comprise, consist essentially of, or consist of SEQ ID NO: 100.

[0643] A bidirectional construct may comprise a first coding sequence that encodes a first coding sequence linked to a splice acceptor and a reverse complement of a second coding sequence operably linked to the reverse complement of a splice acceptor. The bidirectional constructs disclosed herein can also comprise a splice acceptor site on either or both ends of the construct, or splice acceptor sites in both the first segment and the second segment (e.g., a splice acceptor site 5′ of a coding sequence, or a reverse complement of a splice acceptor 3′ of a reverse complement of a coding sequence). The splice acceptor site can, for example, comprise NAG or consist of NAG. In a specific example, the splice acceptor is an ALB splice acceptor (e.g., an ALB splice acceptor used in the splicing together of exons 1 and 2 of ALB (i.e., ALB exon 2 splice acceptor)). For example, such a splice acceptor can be derived from the human ALB gene. In another example, the splice acceptor can be derived from the mouse Alb gene (e.g., an ALB splice acceptor used in the splicing together of exons 1 and 2 of mouse Alb (i.e., mouse Alb exon 2 splice acceptor)). In another example, the splice acceptor is a F9 splice acceptor (e.g., the F9 splice acceptor used in the splicing together of exons 1 and 2 of F9). For example, such a splice acceptor can be derived from the human F9 gene. Alternatively, such a splice acceptor can be derived from the mouse F9 gene. Additional suitable splice acceptor sites useful in eukaryotes, including artificial splice acceptors, are known. See, e.g., Shapiro et al. (1987) Nucleic Acids Res. 15:7155-7174 and Burset et al. (2001) Nucleic Acids Res. 29:255-259, each of which is herein incorporated by reference in its entirety for all purposes. The splice acceptors used in a bidirectional construct may be the same or different. In a specific example, both splice acceptors are mouse Alb exon 2 splice acceptors.

[0644] The bidirectional constructs can be circular or linear. For example, a bidirectional construct can be linear. The first and second segments can be joined in a linear manner through a linker sequence. For example, the 5′ end of the second segment that comprises a reverse complement sequence can be linked to the 3′ end of the first segment. Alternatively, the 5′ end of the first segment can be linked to the 3′ end of the second segment that comprises a reverse complement sequence. The linker can be any suitable length. For example, the linker can be between about 5 to about 2000 nucleotides in length. As an example, the linker sequence can be about 1, about 2, about 3, about 4, about 5, about 6, about 7, about 8, about 9, about 10, about 11, about 12, about 13, about 14, about 15, about 16, about 17, about 18, about 19, about 20, about 25, about 30, about 35, about 40, about 45, about 50, about 55, about 60, about 65, about 70, about 75, about 80, about 85, about 90, about 95, about 100, about 150, about 200, about 250, about 300, about 500, about 1000, about 1500, about 2000, or more nucleotides in length. Other structural elements in addition to, or instead of, a linker sequence, can also be inserted between the first and second segments.

[0645] The bidirectional constructs disclosed herein can be DNA or RNA, single-stranded, double-stranded, or partially single-stranded and partially double-stranded. For example, the constructs can be single- or double-stranded DNA. In some embodiments, the nucleic acid can be modified (e.g., using nucleoside analogs), as described herein. In a specific example, the bidirectional construct is single-stranded (e.g., single-stranded DNA).

[0646] The bidirectional constructs disclosed herein can be modified on either or both ends to include one or more suitable structural features as needed and/or to confer one or more functional benefit. For example, structural modifications can vary depending on the method(s) used to deliver the constructs disclosed herein to a host cell (e.g., use of viral vector delivery or packaging into lipid nanoparticles for delivery). Such modifications include, for example, terminal structures such as inverted terminal repeats (ITR), hairpin, loops, and other structures such as toroids. For example, the constructs disclosed herein can comprise one, two, or three ITRs or can comprise no more than two ITRs. Various methods of structural modifications are known.

[0647] Similarly, one or both ends of the construct can be protected (e.g., from exonucleolytic degradation) by known methods. For example, one or more dideoxynucleotide residues can be added to the 3′ terminus of a linear molecule and/or self-complementary oligonucleotides can be ligated to one or both ends. See, e.g., Chang et al. (1987) Proc. Natl. Acad. Sci. U.S.A. 84:4959-4963 and Nehls et al. (1996) Science 272:886-889, each of which is herein incorporated by reference in its entirety for all purposes. Additional methods for protecting the constructs from degradation include, but are not limited to, addition of terminal amino group(s) and the use of modified internucleotide linkages such as, for example, phosphorothioates, phosphoramidates, and O-methyl ribose or deoxyribose residues.

[0648] As disclosed in more detail herein, the bidirectional constructs disclosed herein can be introduced into a cell as part of a vector having additional sequences such as, for example, replication origins, promoters, and genes encoding antibiotic resistance. The constructs can be introduced as a naked nucleic acid, can be introduced as a nucleic acid complexed with an agent such as a liposome, polymer, or poloxamer, or can be delivered by viral vectors (e.g., adenovirus, AAV, herpesvirus, retrovirus, lentivirus).

[0649] The FIX coding sequences in the bidirectional constructs disclosed herein may include one or more modifications such as codon optimization (e.g., to human codons), depletion of CpG dinucleotides, mutation of cryptic splice sites, addition of one or more glycosylation sites, or any combination thereof. CpG dinucleotides in a construct can limit the therapeutic utility of the construct. First, unmethylated CpG dinucleotides can interact with host toll-like receptor-9 (TLR-9) to stimulate innate, proinflammatory immune responses. Second, once the CpG dinucleotides become methylated, they can result in the suppression of transgene expression coordinated by methyl-CpG binding proteins. Cryptic splice sites are sequences in a pre-messenger RNA that are not normally used as splice sites, but that can be activated, for example, by mutations that either inactivate canonical splice sites or create splice sites where one did not exist before. Accurate splice site selection is critical for successful gene expression, and removal of cryptic splice sites can favor use of the normal or intended splice site.

[0650] In one example, a FIX coding sequence in a bidirectional construct disclosed herein has one or more cryptic splice sites mutated or removed. In another example, a FIX coding sequence in a bidirectional construct disclosed herein has all identified cryptic splice sites mutated or removed. In another example, a FIX coding sequence in a bidirectional construct disclosed herein has one or more CpG dinucleotides removed (i.e., is CpG depleted). In another example, a FIX coding sequence in a bidirectional construct disclosed herein has all but one CpG dinucleotides removed. In another example, a FIX coding sequence in a bidirectional construct disclosed herein has all CpG dinucleotides removed (i.e., is fully CpG depleted). In another example, a FIX coding sequence in a bidirectional construct disclosed herein is codon optimized (e.g., codon optimized for expression in a human or mammal). In a specific example, a FIX coding sequence in a bidirectional construct disclosed herein has one or more CpG dinucleotides removed (i.e., is CpG depleted) and has one or more cryptic splice sites mutated or removed. In another specific example, a FIX coding sequence in a bidirectional construct disclosed herein has all but one CpG dinucleotides removed and has one or more or all identified cryptic splice sites mutated or removed. In another specific example, a FIX coding sequence in a bidirectional construct disclosed herein has one or more CpG dinucleotides removed (i.e., is CpG depleted) and is codon optimized (e.g., codon optimized for expression in a human or mammal). In another specific example, a FIX coding sequence in a bidirectional construct disclosed herein has all CpG dinucleotides removed (i.e., is fully CpG depleted) and is codon optimized (e.g., codon optimized for expression in a human or mammal).

[0651] In one specific example, one FIX coding sequence in a bidirectional construct disclosed herein has one or more CpG dinucleotides removed (i.e., is CpG depleted) and has one or more cryptic splice sites mutated or removed, and the other FIX coding sequence in the bidirectional construct disclosed herein has one or more CpG dinucleotides removed (i.e., is CpG depleted) and is codon optimized (e.g., codon optimized for expression in a human or mammal). In another specific example, one FIX coding sequence in a bidirectional construct disclosed herein has all but one CpG dinucleotides removed and has one or more or all identified cryptic splice sites mutated or removed, and the other FIX coding sequence in the bidirectional construct disclosed herein has all CpG dinucleotides removed (i.e., is fully CpG depleted) and is codon optimized (e.g., codon optimized for expression in a human or mammal).

[0652] In an exemplary bidirectional construct, the second segment is located 3′ of the first segment, the first FIX coding sequence and the second FIX coding sequence both encode the same human FIX protein, the second FIX coding sequence adopts a different codon usage from the codon usage of the first FIX coding sequence, the first segment comprises a first polyadenylation signal sequence located 3′ of the first FIX coding sequence, the second segment comprises a reverse complement of a second polyadenylation signal sequence located 5′ of the reverse complement of the second FIX coding sequence, the first segment comprises a first splice acceptor site located 5′ of the first FIX coding sequence, the second segment comprises a reverse complement of a second splice acceptor site located 3′ of the reverse complement of the second FIX coding sequence, the nucleic acid construct does not comprise a promoter that drives expression of the first FIX protein or the second FIX protein, and optionally the nucleic acid construct does not comprise a homology arm.

[0653] In one example of a bidirectional construct, the first FIX protein coding sequence and the second FIX protein coding sequence are different but encode the same FIX protein sequence, and one of the FIX coding sequences is CpG-depleted (e.g., fully CpG-depleted) and/or codon optimized (e.g., CpG-depleted and codon optimized or fully CpG-depleted and codon optimized). In one example, the one of the FIX coding sequences is (or comprises a sequence) at least 90%, at least 91%, at least 92%, at least 93%, at least 94%, at least 95%, at least 96%, at least 97%, at least 98%, at least 99%, at least 99.5%, or 100% identical to any one of SEQ ID NOS: 64-73. See, e.g., WO 2023/077012 and US 2023-0149563, each of which is herein incorporated by reference in its entirety for all purposes. In another example, the one of the FIX coding sequences is (or comprises a sequence) at least 95%, at least 96%, at least 97%, at least 98%, at least 99%, at least 99.5%, or 100% identical to any one of SEQ ID NOS: 64-73. In another example, the one of the FIX coding sequences is (or comprises a sequence) at least 99%, at least 99.5%, or 100% identical to any one of SEQ ID NOS: 64-73. In another example, the one of the FIX coding sequences comprises the sequence set forth in any one of SEQ ID NOS: 64-73. In another example, the one of the FIX coding sequences consists essentially of the sequence set forth in any one of SEQ ID NOS: 64-73. In another example, the one of the FIX coding sequences consists of the sequence set forth in any one of SEQ ID NOS: 64-73. Optionally, the one of the FIX coding sequences encodes a FIX protein (or a FIX protein comprising a sequence) at least 90%, at least 91%, at least 92%, at least 93%, at least 94%, at least 95%, at least 96%, at least 97%, at least 98%, at least 99%, at least 99.5%, or 100% identical to SEQ ID NO: 97 (and, e.g., retaining the activity of native FIX). Optionally, the one of the FIX coding sequences encodes a FIX protein (or a FIX protein comprising a sequence) at least 95%, at least 96%, at least 97%, at least 98%, at least 99%, at least 99.5%, or 100% identical to SEQ ID NO: 97 (and, e.g., retaining the activity of native FIX). Optionally, the one of the FIX coding sequences in the above examples encodes a FIX protein (or a FIX protein comprising a sequence) at least 99%, at least 99.5%, or 100% identical to SEQ ID NO: 97 (and, e.g., retaining the activity of native FIX). Optionally, the one of the FIX coding sequences in the above examples encodes a FIX protein comprising the sequence set forth in SEQ ID NO: 97. Optionally, the one of the FIX coding sequences in the above examples encodes a FIX protein consisting essentially of the sequence set forth in SEQ ID NO: 97. Optionally, the one of the FIX coding sequences in the above examples encodes a FIX protein consisting of the sequence set forth in SEQ ID NO: 97.

[0654] In one example, the one of the FIX coding sequences is (or comprises a sequence) at least 90%, at least 91%, at least 92%, at least 93%, at least 94%, at least 95%, at least 96%, at least 97%, at least 98%, at least 99%, at least 99.5%, or 100% identical to any one of SEQ ID NOS: 66-73. In another example, the one of the FIX coding sequences is (or comprises a sequence) at least 95%, at least 96%, at least 97%, at least 98%, at least 99%, at least 99.5%, or 100% identical to any one of SEQ ID NOS: 66-73. In another example, the one of the FIX coding sequences is (or comprises a sequence) at least 99%, at least 99.5%, or 100% identical to any one of SEQ ID NOS: 66-73. In another example, the one of the FIX coding sequences comprises the sequence set forth in any one of SEQ ID NOS: 66-73. In another example, the one of the FIX coding sequences consists essentially of the sequence set forth in any one of SEQ ID NOS: 66-73. In another example, the one of the FIX coding sequences consists of the sequence set forth in any one of SEQ ID NOS: 66-73. The one of the FIX coding sequences can be, for example, CpG-depleted (e.g., fully CpG-depleted) and/or codon optimized. For example, the one of the FIX coding sequences can be CpG depleted (e.g., fully CpG-depleted) and codon optimized. Optionally, the one of the FIX coding sequences encodes a FIX protein (or a FIX protein comprising a sequence) at least 90%, at least 91%, at least 92%, at least 93%, at least 94%, at least 95%, at least 96%, at least 97%, at least 98%, at least 99%, at least 99.5%, or 100% identical to SEQ ID NO: 97 (and, e.g., retaining the activity of native FIX). Optionally, the one of the FIX coding sequences encodes a FIX protein (or a FIX protein comprising a sequence) at least 95%, at least 96%, at least 97%, at least 98%, at least 99%, at least 99.5%, or 100% identical to SEQ ID NO: 97 (and, e.g., retaining the activity of native FIX). Optionally, the one of the FIX coding sequences in the above examples encodes a FIX protein at least 99%, at least 99.5%, or 100% identical to SEQ ID NO: 97 (and, e.g., retaining the activity of native FIX). Optionally, the one of the FIX coding sequences in the above examples encodes a FIX protein (or a FIX protein comprising a sequence) comprising the sequence set forth in SEQ ID NO: 97. Optionally, the one of the FIX coding sequences in the above examples encodes a FIX protein consisting essentially of the sequence set forth in SEQ ID NO: 97. Optionally, the one of the FIX coding sequences in the above examples encodes a FIX protein consisting of the sequence set forth in SEQ ID NO: 97.

[0655] In one example, the one of the FIX coding sequences is (or comprises a sequence) at least 90%, at least 91%, at least 92%, at least 93%, at least 94%, at least 95%, at least 96%, at least 97%, at least 98%, at least 99%, at least 99.5%, or 100% identical to SEQ ID NO: 68 or 67. In another example, the one of the FIX coding sequences is (or comprises a sequence) at least 95%, at least 96%, at least 97%, at least 98%, at least 99%, at least 99.5%, or 100% identical to SEQ ID NO: 68 or 67. In another example, the one of the FIX coding sequences is (or comprises a sequence) at least 99%, at least 99.5%, or 100% identical to SEQ ID NO: 68 or 67. In another example, the one of the FIX coding sequences comprises the sequence set forth in SEQ ID NO: 68 or 67. In another example, the one of the FIX coding sequences consists essentially of the sequence set forth in SEQ ID NO: 68 or 67. In another example, the one of the FIX coding sequences consists of the sequence set forth in SEQ ID NO: 68 or 67. The one of the FIX coding sequences can be, for example, CpG-depleted (e.g., fully CpG-depleted) and/or codon optimized. For example, the one of the FIX coding sequences can be CpG depleted (e.g., fully CpG-depleted) and codon optimized. Optionally, the one of the FIX coding sequences encodes a FIX protein (or a FIX protein comprising a sequence) at least 90%, at least 91%, at least 92%, at least 93%, at least 94%, at least 95%, at least 96%, at least 97%, at least 98%, at least 99%, at least 99.5%, or 100% identical to SEQ ID NO: 97 (and, e.g., retaining the activity of native FIX). Optionally, the one of the FIX coding sequences encodes a FIX protein (or a FIX protein comprising a sequence) at least 95%, at least 96%, at least 97%, at least 98%, at least 99%, at least 99.5%, or 100% identical to SEQ ID NO: 97 (and, e.g., retaining the activity of native FIX). Optionally, the one of the FIX coding sequences in the above examples encodes a FIX protein (or a FIX protein comprising a sequence) at least 99%, at least 99.5%, or 100% identical to SEQ ID NO: 97 (and, e.g., retaining the activity of native FIX). Optionally, the one of the FIX coding sequences in the above examples encodes a FIX protein comprising the sequence set forth in SEQ ID NO: 97. Optionally, the one of the FIX coding sequences in the above examples encodes a FIX protein consisting essentially of the sequence set forth in SEQ ID NO: 97. Optionally, the one of the FIX coding sequences in the above examples encodes a FIX protein consisting of the sequence set forth in SEQ ID NO: 97.

[0656] In one example, the one of the FIX coding sequences is (or comprises a sequence) at least 90%, at least 91%, at least 92%, at least 93%, at least 94%, at least 95%, at least 96%, at least 97%, at least 98%, at least 99%, at least 99.5%, or 100% identical to SEQ ID NO: 68. In another example, the one of the FIX coding sequences is (or comprises a sequence) at least 90%, at least 91%, at least 92%, at least 93%, at least 94%, at least 95%, at least 96%, at least 97%, at least 98%, at least 99%, at least 99.5%, or 100% identical to SEQ ID NO: 68 and encodes a FIX protein (or a FIX protein comprising a sequence) at least 99%, at least 99.5%, or 100% identical to SEQ ID NO: 97. In another example, the one of the FIX coding sequences is (or comprises a sequence) at least 90%, at least 91%, at least 92%, at least 93%, at least 94%, at least 95%, at least 96%, at least 97%, at least 98%, at least 99%, at least 99.5%, or 100% identical to SEQ ID NO: 68 and encodes a FIX protein comprising the sequence set forth in SEQ ID NO: 97. In another example, the one of the FIX coding sequences is (or comprises a sequence) at least 95%, at least 96%, at least 97%, at least 98%, at least 99%, at least 99.5%, or 100% identical to SEQ ID NO: 68. In another example, the one of the FIX coding sequences is (or comprises a sequence) at least 95%, at least 96%, at least 97%, at least 98%, at least 99%, at least 99.5%, or 100% identical to SEQ ID NO: 68 and encodes a FIX protein (or a FIX protein comprising a sequence) at least 99%, at least 99.5%, or 100% identical to SEQ ID NO: 97. In another example, the one of the FIX coding sequences is (or comprises a sequence) at least 95%, at least 96%, at least 97%, at least 98%, at least 99%, at least 99.5%, or 100% identical to SEQ ID NO: 68 and encodes a FIX protein comprising the sequence set forth in SEQ ID NO: 97. In another example, the one of the FIX coding sequences is (or comprises a sequence) at least 99%, at least 99.5%, or 100% identical to SEQ ID NO: 68. In another example, the one of the FIX coding sequences is (or comprises a sequence) at least 99%, at least 99.5%, or 100% identical to SEQ ID NO: 68 and encodes a FIX protein (or a FIX protein comprising a sequence) at least 99%, at least 99.5%, or 100% identical to SEQ ID NO: 97. In another example, the one of the FIX coding sequences is (or comprises a sequence) at least 99%, at least 99.5%, or 100% identical to SEQ ID NO: 68 and encodes a FIX protein comprising the sequence set forth in SEQ ID NO: 97. In another example, the one of the FIX coding sequences comprises the sequence set forth in SEQ ID NO: 68. In another example, the one of the FIX coding sequences consists essentially of the sequence set forth in SEQ ID NO: 68. In another example, the one of the FIX coding sequences consists of the sequence set forth in SEQ ID NO: 68. The one of the FIX coding sequences can be, for example, CpG-depleted (e.g., fully CpG-depleted) and/or codon optimized. For example, the one of the FIX coding sequences can be CpG depleted (e.g., fully CpG-depleted) and codon optimized. Optionally, the one of the FIX coding sequences encodes a FIX protein (or a FIX protein comprising a sequence) at least 90%, at least 91%, at least 92%, at least 93%, at least 94%, at least 95%, at least 96%, at least 97%, at least 98%, at least 99%, at least 99.5%, or 100% identical to SEQ ID NO: 97 (and, e.g., retaining the activity of native FIX). Optionally, the one of the FIX coding sequences encodes a FIX protein (or a FIX protein comprising a sequence) at least 95%, at least 96%, at least 97%, at least 98%, at least 99%, at least 99.5%, or 100% identical to SEQ ID NO: 97 (and, e.g., retaining the activity of native FIX). Optionally, the one of the FIX coding sequences in the above examples encodes a FIX protein (or a FIX protein comprising a sequence) at least 99%, at least 99.5%, or 100% identical to SEQ ID NO: 97 (and, e.g., retaining the activity of native FIX). Optionally, the one of the FIX coding sequences in the above examples encodes a FIX protein comprising the sequence set forth in SEQ ID NO: 97. Optionally, the one of the FIX coding sequences in the above examples encodes a FIX protein consisting essentially of the sequence set forth in SEQ ID NO: 97. Optionally, the one of the FIX coding sequences in the above examples encodes a FIX protein consisting of the sequence set forth in SEQ ID NO: 97.

[0657] Various native and optimized native FIX coding sequences are also provided. In one example, the one of the FIX coding sequences is (or comprises a sequence) at least 90%, at least 91%, at least 92%, at least 93%, at least 94%, at least 95%, at least 96%, at least 97%, at least 98%, at least 99%, at least 99.5%, or 100% identical to any one of SEQ ID NOS: 60-63. In another example, the one of the FIX coding sequences is (or comprises a sequence) at least 95%, at least 96%, at least 97%, at least 98%, at least 99%, at least 99.5%, or 100% identical to any one of SEQ ID NOS: 60-63. In another example, the one of the FIX coding sequences is (or comprises a sequence) at least 99%, at least 99.5%, or 100% identical to any one of SEQ ID NOS: 60-63. In another example, the one of the FIX coding sequences comprises the sequence set forth in any one of SEQ ID NOS: 60-63. In another example, the one of the FIX coding sequences consists essentially of the sequence set forth in any one of SEQ ID NOS: 60-63. In another example, the one of the FIX coding sequences consists of the sequence set forth in any one of SEQ ID NOS: 60-63. The one of the FIX coding sequences can be, for example, CpG-depleted (e.g., all but one CpG dinucleotides removed or fully CpG-depleted) and/or modified to mutate one or more cryptic splice donor sequences (e.g., all identified cryptic splice donor sequences). For example, the one of the FIX coding sequences can be CpG depleted (e.g., all but one CpG dinucleotides removed or fully CpG-depleted) and modified to mutate one or more cryptic splice donor sequences (e.g., all identified cryptic splice donor sequences). Optionally, the one of the FIX coding sequences encodes a FIX protein (or a FIX protein comprising a sequence) at least 90%, at least 91%, at least 92%, at least 93%, at least 94%, at least 95%, at least 96%, at least 97%, at least 98%, at least 99%, at least 99.5%, or 100% identical to SEQ ID NO: 97 (and, e.g., retaining the activity of native FIX). Optionally, the one of the FIX coding sequences encodes a FIX protein (or a FIX protein comprising a sequence) at least 95%, at least 96%, at least 97%, at least 98%, at least 99%, at least 99.5%, or 100% identical to SEQ ID NO: 97 (and, e.g., retaining the activity of native FIX). Optionally, the one of the FIX coding sequences in the above examples encodes a FIX protein (or a FIX protein comprising a sequence) at least 99%, at least 99.5%, or 100% identical to SEQ ID NO: 97 (and, e.g., retaining the activity of native FIX). Optionally, the one of the FIX coding sequences in the above examples encodes a FIX protein comprising the sequence set forth in SEQ ID NO: 97. Optionally, the one of the FIX coding sequences in the above examples encodes a FIX protein consisting essentially of the sequence set forth in SEQ ID NO: 97. Optionally, the one of the FIX coding sequences in the above examples encodes a FIX protein consisting of the sequence set forth in SEQ ID NO: 97.

[0658] Various optimized native FIX coding sequences are also provided. In one example, the one of the FIX coding sequences is (or comprises a sequence) at least 90%, at least 91%, at least 92%, at least 93%, at least 94%, at least 95%, at least 96%, at least 97%, at least 98%, at least 99%, at least 99.5%, or 100% identical to any one of SEQ ID NOS: 61-63. In another example, the one of the FIX coding sequences is (or comprises a sequence) at least 95%, at least 96%, at least 97%, at least 98%, at least 99%, at least 99.5%, or 100% identical to any one of SEQ ID NOS: 61-63. In another example, the one of the FIX coding sequences is (or comprises a sequence) at least 99%, at least 99.5%, or 100% identical to any one of SEQ ID NOS: 61-63. In another example, the one of the FIX coding sequences comprises the sequence set forth in any one of SEQ ID NOS: 61-63. In another example, the one of the FIX coding sequences consists essentially of the sequence set forth in any one of SEQ ID NOS: 61-63. In another example, the one of the FIX coding sequences consists of the sequence set forth in any one of SEQ ID NOS: 61-63. The one of the FIX coding sequences can be, for example, CpG-depleted (e.g., all but one CpG dinucleotides removed or fully CpG-depleted) and/or modified to mutate one or more cryptic splice donor sequences (e.g., all identified cryptic splice donor sequences). For example, the one of the FIX coding sequences can be CpG depleted (e.g., all but one CpG dinucleotides removed or fully CpG-depleted) and modified to mutate one or more cryptic splice donor sequences (e.g., all identified cryptic splice donor sequences). Optionally, the one of the FIX coding sequences encodes a FIX protein (or a FIX protein comprising a sequence) at least 90%, at least 91%, at least 92%, at least 93%, at least 94%, at least 95%, at least 96%, at least 97%, at least 98%, at least 99%, at least 99.5%, or 100% identical to SEQ ID NO: 97 (and, e.g., retaining the activity of native FIX). Optionally, the one of the FIX coding sequences encodes a FIX protein (or a FIX protein comprising a sequence) at least 95%, at least 96%, at least 97%, at least 98%, at least 99%, at least 99.5%, or 100% identical to SEQ ID NO: 97 (and, e.g., retaining the activity of native FIX). Optionally, the one of the FIX coding sequences in the above examples encodes a FIX protein (or a FIX protein comprising a sequence) at least 99%, at least 99.5%, or 100% identical to SEQ ID NO: 97 (and, e.g., retaining the activity of native FIX). Optionally, the one of the FIX coding sequences in the above examples encodes a FIX protein comprising the sequence set forth in SEQ ID NO: 97. Optionally, the one of the FIX coding sequences in the above examples encodes a FIX protein consisting essentially of the sequence set forth in SEQ ID NO: 97. Optionally, the one of the FIX coding sequences in the above examples encodes a FIX protein consisting of the sequence set forth in SEQ ID NO: 97.

[0659] In one example, the one of the FIX coding sequences is (or comprises a sequence) at least 90%, at least 91%, at least 92%, at least 93%, at least 94%, at least 95%, at least 96%, at least 97%, at least 98%, at least 99%, at least 99.5%, or 100% identical to SEQ ID NO: 61. In another example, the one of the FIX coding sequences is (or comprises a sequence) at least 90%, at least 91%, at least 92%, at least 93%, at least 94%, at least 95%, at least 96%, at least 97%, at least 98%, at least 99%, at least 99.5%, or 100% identical to SEQ ID NO: 61 and encodes a FIX protein (or a FIX protein comprising a sequence) at least 99%, at least 99.5%, or 100% identical to SEQ ID NO: 97. In another example, the one of the FIX coding sequences is (or comprises a sequence) at least 90%, at least 91%, at least 92%, at least 93%, at least 94%, at least 95%, at least 96%, at least 97%, at least 98%, at least 99%, at least 99.5%, or 100% identical to SEQ ID NO: 61 and encodes a FIX protein comprising the sequence set forth in SEQ ID NO: 97. In another example, the one of the FIX coding sequences is (or comprises a sequence) at least 95%, at least 96%, at least 97%, at least 98%, at least 99%, at least 99.5%, or 100% identical to SEQ ID NO: 61. In another example, the one of the FIX coding sequences is (or comprises a sequence) at least 95%, at least 96%, at least 97%, at least 98%, at least 99%, at least 99.5%, or 100% identical to SEQ ID NO: 61 and encodes a FIX protein (or a FIX protein comprising a sequence) at least 99%, at least 99.5%, or 100% identical to SEQ ID NO: 97. In another example, the one of the FIX coding sequences is (or comprises a sequence) at least 95%, at least 96%, at least 97%, at least 98%, at least 99%, at least 99.5%, or 100% identical to SEQ ID NO: 61 and encodes a FIX protein comprising the sequence set forth in SEQ ID NO: 97. In another example, the one of the FIX coding sequences is (or comprises a sequence) at least 99%, at least 99.5%, or 100% identical to SEQ ID NO: 61. In another example, the one of the FIX coding sequences is (or comprises a sequence) at least 99%, at least 99.5%, or 100% identical to SEQ ID NO: 61 and encodes a FIX protein (or a FIX protein comprising a sequence) at least 99%, at least 99.5%, or 100% identical to SEQ ID NO: 97. In another example, the one of the FIX coding sequences is (or comprises a sequence) at least 99%, at least 99.5%, or 100% identical to SEQ ID NO: 61 and encodes a FIX protein comprising the sequence set forth in SEQ ID NO: 97. In another example, the one of the FIX coding sequences comprises the sequence set forth in SEQ ID NO: 61. In another example, the one of the FIX coding sequences consists essentially of the sequence set forth in SEQ ID NO: 61. In another example, the one of the FIX coding sequences consists of the sequence set forth in SEQ ID NO: 61. The one of the FIX coding sequences can be, for example, CpG-depleted (e.g., all but one CpG dinucleotides removed or fully CpG-depleted) and/or modified to mutate one or more cryptic splice donor sequences (e.g., all identified cryptic splice donor sequences). For example, the one of the FIX coding sequences can be CpG depleted (e.g., all but one CpG dinucleotides removed or fully CpG-depleted) and modified to mutate one or more cryptic splice donor sequences (e.g., all identified cryptic splice donor sequences). Optionally, the one of the FIX coding sequences encodes a FIX protein (or a FIX protein comprising a sequence) at least 90%, at least 91%, at least 92%, at least 93%, at least 94%, at least 95%, at least 96%, at least 97%, at least 98%, at least 99%, at least 99.5%, or 100% identical to SEQ ID NO: 97 (and, e.g., retaining the activity of native FIX). Optionally, the one of the FIX coding sequences encodes a FIX protein (or a FIX protein comprising a sequence) at least 95%, at least 96%, at least 97%, at least 98%, at least 99%, at least 99.5%, or 100% identical to SEQ ID NO: 97 (and, e.g., retaining the activity of native FIX). Optionally, the one of the FIX coding sequences in the above examples encodes a FIX protein (or a FIX protein comprising a sequence) at least 99%, at least 99.5%, or 100% identical to SEQ ID NO: 97 (and, e.g., retaining the activity of native FIX). Optionally, the one of the FIX coding sequences in the above examples encodes a FIX protein comprising the sequence set forth in SEQ ID NO: 97. Optionally, the FIX coding sequence in the above examples encodes a FIX protein consisting essentially of the sequence set forth in SEQ ID NO: 97. Optionally, the one of the FIX coding sequences in the above examples encodes a FIX protein consisting of the sequence set forth in SEQ ID NO: 97.

[0660] In one example, the one of the FIX coding sequences is (or comprises a sequence) at least 90%, at least 91%, at least 92%, at least 93%, at least 94%, at least 95%, at least 96%, at least 97%, at least 98%, at least 99%, at least 99.5%, or 100% identical to SEQ ID NO: 68. The one of the FIX coding sequences can be, for example, CpG-depleted (e.g., fully CpG-depleted) and/or codon optimized. For example, the one of the FIX coding sequences can be CpG depleted (e.g., fully CpG-depleted) and codon optimized. In one example, the other FIX coding sequence is (or comprises a sequence) at least 90%, at least 91%, at least 92%, at least 93%, at least 94%, at least 95%, at least 96%, at least 97%, at least 98%, at least 99%, at least 99.5%, or 100% identical to SEQ ID NO: 61. In another example, the other FIX coding sequence is (or comprises a sequence) at least 90%, at least 91%, at least 92%, at least 93%, at least 94%, at least 95%, at least 96%, at least 97%, at least 98%, at least 99%, at least 99.5%, or 100% identical to SEQ ID NO: 61 and encodes a FIX protein (or a FIX protein comprising a sequence) at least 99%, at least 99.5%, or 100% identical to SEQ ID NO: 97. In another example, the other FIX coding sequence is (or comprises a sequence) at least 90%, at least 91%, at least 92%, at least 93%, at least 94%, at least 95%, at least 96%, at least 97%, at least 98%, at least 99%, at least 99.5%, or 100% identical to SEQ ID NO: 61 and encodes a FIX protein comprising the sequence set forth in SEQ ID NO: 97. In another example, the other FIX coding sequence is (or comprises a sequence) at least 95%, at least 96%, at least 97%, at least 98%, at least 99%, at least 99.5%, or 100% identical to SEQ ID NO: 61. In another example, the other FIX coding sequence is (or comprises a sequence) at least 95%, at least 96%, at least 97%, at least 98%, at least 99%, at least 99.5%, or 100% identical to SEQ ID NO: 61 and encodes a FIX protein (or a FIX protein comprising a sequence) at least 99%, at least 99.5%, or 100% identical to SEQ ID NO: 97. In another example, the other FIX coding sequence is (or comprises a sequence) at least 95%, at least 96%, at least 97%, at least 98%, at least 99%, at least 99.5%, or 100% identical to SEQ ID NO: 61 and encodes a FIX protein comprising the sequence set forth in SEQ ID NO: 97. In another example, the other FIX coding sequence is (or comprises a sequence) at least 99%, at least 99.5%, or 100% identical to SEQ ID NO: 61. In another example, the other FIX coding sequence is (or comprises a sequence) at least 99%, at least 99.5%, or 100% identical to SEQ ID NO: 61 and encodes a FIX protein (or a FIX protein comprising a sequence) at least 99%, at least 99.5%, or 100% identical to SEQ ID NO: 97. In another example, the other FIX coding sequence is (or comprises a sequence) at least 99%, at least 99.5%, or 100% identical to SEQ ID NO: 61 and encodes a FIX protein comprising the sequence set forth in SEQ ID NO: 97. In another example, the other FIX coding sequence comprises the sequence set forth in SEQ ID NO: 61. In another example, the other FIX coding sequence consists essentially of the sequence set forth in SEQ ID NO: 61. In another example, the other FIX coding sequence consists of the sequence set forth in SEQ ID NO: 61. The other FIX coding sequence can be, for example, CpG-depleted (e.g., all but one CpG dinucleotides removed or fully CpG-depleted) and/or modified to mutate one or more cryptic splice donor sequences (e.g., all identified cryptic splice donor sequences). For example, the other FIX coding sequence can be CpG depleted (e.g., all but one CpG dinucleotides removed or fully CpG-depleted) and modified to mutate one or more cryptic splice donor sequences (e.g., all identified cryptic splice donor sequences). Optionally, one or both of the FIX coding sequence encodes a FIX protein (or a FIX protein comprising a sequence) at least 90%, at least 91%, at least 92%, at least 93%, at least 94%, at least 95%, at least 96%, at least 97%, at least 98%, at least 99%, at least 99.5%, or 100% identical to SEQ ID NO: 97 (and, e.g., retaining the activity of native FIX). Optionally, one or both of the FIX coding sequence encodes a FIX protein (or a FIX protein comprising a sequence) at least 95%, at least 96%, at least 97%, at least 98%, at least 99%, at least 99.5%, or 100% identical to SEQ ID NO: 97 (and, e.g., retaining the activity of native FIX). Optionally, one or both of the FIX coding sequence in the above examples encodes a FIX protein (or a FIX protein comprising a sequence) at least 99%, at least 99.5%, or 100% identical to SEQ ID NO: 97 (and, e.g., retaining the activity of native FIX). Optionally, one or both of the FIX coding sequence in the above examples encodes a FIX protein comprising the sequence set forth in SEQ ID NO: 97. Optionally, one or both of the FIX coding sequence in the above examples encodes a FIX protein consisting essentially of the sequence set forth in SEQ ID NO: 97. Optionally, one or both of the FIX coding sequence in the above examples encodes a FIX protein consisting of the sequence set forth in SEQ ID NO: 97.

[0661] In another example, the one of the FIX coding sequences is (or comprises a sequence) at least 90%, at least 91%, at least 92%, at least 93%, at least 94%, at least 95%, at least 96%, at least 97%, at least 98%, at least 99%, at least 99.5%, or 100% identical to SEQ ID NO: 68 and encodes a FIX protein (or a FIX protein comprising a sequence) at least 99%, at least 99.5%, or 100% identical to SEQ ID NO: 97. The one of the FIX coding sequences can be, for example, CpG-depleted (e.g., fully CpG-depleted) and/or codon optimized. For example, the one of the FIX coding sequences can be CpG depleted (e.g., fully CpG-depleted) and codon optimized. In one example, the other FIX coding sequence is (or comprises a sequence) at least 90%, at least 91%, at least 92%, at least 93%, at least 94%, at least 95%, at least 96%, at least 97%, at least 98%, at least 99%, at least 99.5%, or 100% identical to SEQ ID NO: 61. In another example, the other FIX coding sequence is (or comprises a sequence) at least 90%, at least 91%, at least 92%, at least 93%, at least 94%, at least 95%, at least 96%, at least 97%, at least 98%, at least 99%, at least 99.5%, or 100% identical to SEQ ID NO: 61 and encodes a FIX protein (or a FIX protein comprising a sequence) at least 99%, at least 99.5%, or 100% identical to SEQ ID NO: 97. In another example, the other FIX coding sequence is (or comprises a sequence) at least 90%, at least 91%, at least 92%, at least 93%, at least 94%, at least 95%, at least 96%, at least 97%, at least 98%, at least 99%, at least 99.5%, or 100% identical to SEQ ID NO: 61 and encodes a FIX protein comprising the sequence set forth in SEQ ID NO: 97. In another example, the other FIX coding sequence is (or comprises a sequence) at least 95%, at least 96%, at least 97%, at least 98%, at least 99%, at least 99.5%, or 100% identical to SEQ ID NO: 61. In another example, the other FIX coding sequence is (or comprises a sequence) at least 95%, at least 96%, at least 97%, at least 98%, at least 99%, at least 99.5%, or 100% identical to SEQ ID NO: 61 and encodes a FIX protein (or a FIX protein comprising a sequence) at least 99%, at least 99.5%, or 100% identical to SEQ ID NO: 97. In another example, the other FIX coding sequence is (or comprises a sequence) at least 95%, at least 96%, at least 97%, at least 98%, at least 99%, at least 99.5%, or 100% identical to SEQ ID NO: 61 and encodes a FIX protein comprising the sequence set forth in SEQ ID NO: 97. In another example, the other FIX coding sequence is (or comprises a sequence) at least 99%, at least 99.5%, or 100% identical to SEQ ID NO: 61. In another example, the other FIX coding sequence is (or comprises a sequence) at least 99%, at least 99.5%, or 100% identical to SEQ ID NO: 61 and encodes a FIX protein (or a FIX protein comprising a sequence) at least 99%, at least 99.5%, or 100% identical to SEQ ID NO: 97. In another example, the other FIX coding sequence is (or comprises a sequence) at least 99%, at least 99.5%, or 100% identical to SEQ ID NO: 61 and encodes a FIX protein comprising the sequence set forth in SEQ ID NO: 97. In another example, the other FIX coding sequence comprises the sequence set forth in SEQ ID NO: 61. In another example, the other FIX coding sequence consists essentially of the sequence set forth in SEQ ID NO: 61. In another example, the other FIX coding sequence consists of the sequence set forth in SEQ ID NO: 61. The other FIX coding sequence can be, for example, CpG-depleted (e.g., all but one CpG dinucleotides removed or fully CpG-depleted) and/or modified to mutate one or more cryptic splice donor sequences (e.g., all identified cryptic splice donor sequences). For example, the other FIX coding sequence can be CpG depleted (e.g., all but one CpG dinucleotides removed or fully CpG-depleted) and modified to mutate one or more cryptic splice donor sequences (e.g., all identified cryptic splice donor sequences). Optionally, one or both of the FIX coding sequence encodes a FIX protein (or a FIX protein comprising a sequence) at least 90%, at least 91%, at least 92%, at least 93%, at least 94%, at least 95%, at least 96%, at least 97%, at least 98%, at least 99%, at least 99.5%, or 100% identical to SEQ ID NO: 97 (and, e.g., retaining the activity of native FIX). Optionally, one or both of the FIX coding sequence encodes a FIX protein (or a FIX protein comprising a sequence) at least 95%, at least 96%, at least 97%, at least 98%, at least 99%, at least 99.5%, or 100% identical to SEQ ID NO: 97 (and, e.g., retaining the activity of native FIX). Optionally, one or both of the FIX coding sequence in the above examples encodes a FIX protein (or a FIX protein comprising a sequence) at least 99%, at least 99.5%, or 100% identical to SEQ ID NO: 97 (and, e.g., retaining the activity of native FIX). Optionally, one or both of the FIX coding sequence in the above examples encodes a FIX protein comprising the sequence set forth in SEQ ID NO: 97. Optionally, one or both of the FIX coding sequence in the above examples encodes a FIX protein consisting essentially of the sequence set forth in SEQ ID NO: 97. Optionally, one or both of the FIX coding sequence in the above examples encodes a FIX protein consisting of the sequence set forth in SEQ ID NO: 97.

[0662] In another example, the one of the FIX coding sequences is (or comprises a sequence) at least 90%, at least 91%, at least 92%, at least 93%, at least 94%, at least 95%, at least 96%, at least 97%, at least 98%, at least 99%, at least 99.5%, or 100% identical to SEQ ID NO: 68 and encodes a FIX protein comprising the sequence set forth in SEQ ID NO: 97. The one of the FIX coding sequences can be, for example, CpG-depleted (e.g., fully CpG-depleted) and/or codon optimized. For example, the one of the FIX coding sequences can be CpG depleted (e.g., fully CpG-depleted) and codon optimized. In one example, the other FIX coding sequence is (or comprises a sequence) at least 90%, at least 91%, at least 92%, at least 93%, at least 94%, at least 95%, at least 96%, at least 97%, at least 98%, at least 99%, at least 99.5%, or 100% identical to SEQ ID NO: 61. In another example, the other FIX coding sequence is (or comprises a sequence) at least 90%, at least 91%, at least 92%, at least 93%, at least 94%, at least 95%, at least 96%, at least 97%, at least 98%, at least 99%, at least 99.5%, or 100% identical to SEQ ID NO: 61 and encodes a FIX protein (or a FIX protein comprising a sequence) at least 99%, at least 99.5%, or 100% identical to SEQ ID NO: 97. In another example, the other FIX coding sequence is (or comprises a sequence) at least 90%, at least 91%, at least 92%, at least 93%, at least 94%, at least 95%, at least 96%, at least 97%, at least 98%, at least 99%, at least 99.5%, or 100% identical to SEQ ID NO: 61 and encodes a FIX protein comprising the sequence set forth in SEQ ID NO: 97. In another example, the other FIX coding sequence is (or comprises a sequence) at least 95%, at least 96%, at least 97%, at least 98%, at least 99%, at least 99.5%, or 100% identical to SEQ ID NO: 61. In another example, the other FIX coding sequence is (or comprises a sequence) at least 95%, at least 96%, at least 97%, at least 98%, at least 99%, at least 99.5%, or 100% identical to SEQ ID NO: 61 and encodes a FIX protein (or a FIX protein comprising a sequence) at least 99%, at least 99.5%, or 100% identical to SEQ ID NO: 97. In another example, the other FIX coding sequence is (or comprises a sequence) at least 95%, at least 96%, at least 97%, at least 98%, at least 99%, at least 99.5%, or 100% identical to SEQ ID NO: 61 and encodes a FIX protein comprising the sequence set forth in SEQ ID NO: 97. In another example, the other FIX coding sequence is (or comprises a sequence) at least 99%, at least 99.5%, or 100% identical to SEQ ID NO: 61. In another example, the other FIX coding sequence is (or comprises a sequence) at least 99%, at least 99.5%, or 100% identical to SEQ ID NO: 61 and encodes a FIX protein (or a FIX protein comprising a sequence) at least 99%, at least 99.5%, or 100% identical to SEQ ID NO: 97. In another example, the other FIX coding sequence is (or comprises a sequence) at least 99%, at least 99.5%, or 100% identical to SEQ ID NO: 61 and encodes a FIX protein comprising the sequence set forth in SEQ ID NO: 97. In another example, the other FIX coding sequence comprises the sequence set forth in SEQ ID NO: 61. In another example, the other FIX coding sequence consists essentially of the sequence set forth in SEQ ID NO: 61. In another example, the other FIX coding sequence consists of the sequence set forth in SEQ ID NO: 61. The other FIX coding sequence can be, for example, CpG-depleted (e.g., all but one CpG dinucleotides removed or fully CpG-depleted) and/or modified to mutate one or more cryptic splice donor sequences (e.g., all identified cryptic splice donor sequences). For example, the other FIX coding sequence can be CpG depleted (e.g., all but one CpG dinucleotides removed or fully CpG-depleted) and modified to mutate one or more cryptic splice donor sequences (e.g., all identified cryptic splice donor sequences). Optionally, one or both of the FIX coding sequence encodes a FIX protein (or a FIX protein comprising a sequence) at least 90%, at least 91%, at least 92%, at least 93%, at least 94%, at least 95%, at least 96%, at least 97%, at least 98%, at least 99%, at least 99.5%, or 100% identical to SEQ ID NO: 97 (and, e.g., retaining the activity of native FIX). Optionally, one or both of the FIX coding sequence encodes a FIX protein (or a FIX protein comprising a sequence) at least 95%, at least 96%, at least 97%, at least 98%, at least 99%, at least 99.5%, or 100% identical to SEQ ID NO: 97 (and, e.g., retaining the activity of native FIX). Optionally, one or both of the FIX coding sequence in the above examples encodes a FIX protein (or a FIX protein comprising a sequence) at least 99%, at least 99.5%, or 100% identical to SEQ ID NO: 97 (and, e.g., retaining the activity of native FIX). Optionally, one or both of the FIX coding sequence in the above examples encodes a FIX protein comprising the sequence set forth in SEQ ID NO: 97. Optionally, one or both of the FIX coding sequence in the above examples encodes a FIX protein consisting essentially of the sequence set forth in SEQ ID NO: 97. Optionally, one or both of the FIX coding sequence in the above examples encodes a FIX protein consisting of the sequence set forth in SEQ ID NO: 97.

[0663] In another example, the one of the FIX coding sequences is (or comprises a sequence) at least 95%, at least 96%, at least 97%, at least 98%, at least 99%, at least 99.5%, or 100% identical to SEQ ID NO: 68. The one of the FIX coding sequences can be, for example, CpG-depleted (e.g., fully CpG-depleted) and/or codon optimized. For example, the one of the FIX coding sequences can be CpG depleted (e.g., fully CpG-depleted) and codon optimized. In one example, the other FIX coding sequence is (or comprises a sequence) at least 90%, at least 91%, at least 92%, at least 93%, at least 94%, at least 95%, at least 96%, at least 97%, at least 98%, at least 99%, at least 99.5%, or 100% identical to SEQ ID NO: 61. In another example, the other FIX coding sequence is (or comprises a sequence) at least 90%, at least 91%, at least 92%, at least 93%, at least 94%, at least 95%, at least 96%, at least 97%, at least 98%, at least 99%, at least 99.5%, or 100% identical to SEQ ID NO: 61 and encodes a FIX protein (or a FIX protein comprising a sequence) at least 99%, at least 99.5%, or 100% identical to SEQ ID NO: 97. In another example, the other FIX coding sequence is (or comprises a sequence) at least 90%, at least 91%, at least 92%, at least 93%, at least 94%, at least 95%, at least 96%, at least 97%, at least 98%, at least 99%, at least 99.5%, or 100% identical to SEQ ID NO: 61 and encodes a FIX protein comprising the sequence set forth in SEQ ID NO: 97. In another example, the other FIX coding sequence is (or comprises a sequence) at least 95%, at least 96%, at least 97%, at least 98%, at least 99%, at least 99.5%, or 100% identical to SEQ ID NO: 61. In another example, the other FIX coding sequence is (or comprises a sequence) at least 95%, at least 96%, at least 97%, at least 98%, at least 99%, at least 99.5%, or 100% identical to SEQ ID NO: 61 and encodes a FIX protein (or a FIX protein comprising a sequence) at least 99%, at least 99.5%, or 100% identical to SEQ ID NO: 97. In another example, the other FIX coding sequence is (or comprises a sequence) at least 95%, at least 96%, at least 97%, at least 98%, at least 99%, at least 99.5%, or 100% identical to SEQ ID NO: 61 and encodes a FIX protein comprising the sequence set forth in SEQ ID NO: 97. In another example, the other FIX coding sequence is (or comprises a sequence) at least 99%, at least 99.5%, or 100% identical to SEQ ID NO: 61. In another example, the other FIX coding sequence is (or comprises a sequence) at least 99%, at least 99.5%, or 100% identical to SEQ ID NO: 61 and encodes a FIX protein (or a FIX protein comprising a sequence) at least 99%, at least 99.5%, or 100% identical to SEQ ID NO: 97. In another example, the other FIX coding sequence is (or comprises a sequence) at least 99%, at least 99.5%, or 100% identical to SEQ ID NO: 61 and encodes a FIX protein comprising the sequence set forth in SEQ ID NO: 97. In another example, the other FIX coding sequence comprises the sequence set forth in SEQ ID NO: 61. In another example, the other FIX coding sequence consists essentially of the sequence set forth in SEQ ID NO: 61. In another example, the other FIX coding sequence consists of the sequence set forth in SEQ ID NO: 61. The other FIX coding sequence can be, for example, CpG-depleted (e.g., all but one CpG dinucleotides removed or fully CpG-depleted) and/or modified to mutate one or more cryptic splice donor sequences (e.g., all identified cryptic splice donor sequences). For example, the other FIX coding sequence can be CpG depleted (e.g., all but one CpG dinucleotides removed or fully CpG-depleted) and modified to mutate one or more cryptic splice donor sequences (e.g., all identified cryptic splice donor sequences). Optionally, one or both of the FIX coding sequence encodes a FIX protein (or a FIX protein comprising a sequence) at least 90%, at least 91%, at least 92%, at least 93%, at least 94%, at least 95%, at least 96%, at least 97%, at least 98%, at least 99%, at least 99.5%, or 100% identical to SEQ ID NO: 97 (and, e.g., retaining the activity of native FIX). Optionally, one or both of the FIX coding sequence encodes a FIX protein (or a FIX protein comprising a sequence) at least 95%, at least 96%, at least 97%, at least 98%, at least 99%, at least 99.5%, or 100% identical to SEQ ID NO: 97 (and, e.g., retaining the activity of native FIX). Optionally, one or both of the FIX coding sequence in the above examples encodes a FIX protein (or a FIX protein comprising a sequence) at least 99%, at least 99.5%, or 100% identical to SEQ ID NO: 97 (and, e.g., retaining the activity of native FIX). Optionally, one or both of the FIX coding sequence in the above examples encodes a FIX protein comprising the sequence set forth in SEQ ID NO: 97. Optionally, one or both of the FIX coding sequence in the above examples encodes a FIX protein consisting essentially of the sequence set forth in SEQ ID NO: 97. Optionally, one or both of the FIX coding sequence in the above examples encodes a FIX protein consisting of the sequence set forth in SEQ ID NO: 97.

[0664] In another example, the one of the FIX coding sequences is (or comprises a sequence) at least 95%, at least 96%, at least 97%, at least 98%, at least 99%, at least 99.5%, or 100% identical to SEQ ID NO: 68 and encodes a FIX protein (or a FIX protein comprising a sequence) at least 99%, at least 99.5%, or 100% identical to SEQ ID NO: 97. The one of the FIX coding sequences can be, for example, CpG-depleted (e.g., fully CpG-depleted) and/or codon optimized. For example, the one of the FIX coding sequences can be CpG depleted (e.g., fully CpG-depleted) and codon optimized. In one example, the other FIX coding sequence is (or comprises a sequence) at least 90%, at least 91%, at least 92%, at least 93%, at least 94%, at least 95%, at least 96%, at least 97%, at least 98%, at least 99%, at least 99.5%, or 100% identical to SEQ ID NO: 61. In another example, the other FIX coding sequence is (or comprises a sequence) at least 90%, at least 91%, at least 92%, at least 93%, at least 94%, at least 95%, at least 96%, at least 97%, at least 98%, at least 99%, at least 99.5%, or 100% identical to SEQ ID NO: 61 and encodes a FIX protein (or a FIX protein comprising a sequence) at least 99%, at least 99.5%, or 100% identical to SEQ ID NO: 97. In another example, the other FIX coding sequence is (or comprises a sequence) at least 90%, at least 91%, at least 92%, at least 93%, at least 94%, at least 95%, at least 96%, at least 97%, at least 98%, at least 99%, at least 99.5%, or 100% identical to SEQ ID NO: 61 and encodes a FIX protein comprising the sequence set forth in SEQ ID NO: 97. In another example, the other FIX coding sequence is (or comprises a sequence) at least 95%, at least 96%, at least 97%, at least 98%, at least 99%, at least 99.5%, or 100% identical to SEQ ID NO: 61. In another example, the other FIX coding sequence is (or comprises a sequence) at least 95%, at least 96%, at least 97%, at least 98%, at least 99%, at least 99.5%, or 100% identical to SEQ ID NO: 61 and encodes a FIX protein (or a FIX protein comprising a sequence) at least 99%, at least 99.5%, or 100% identical to SEQ ID NO: 97. In another example, the other FIX coding sequence is (or comprises a sequence) at least 95%, at least 96%, at least 97%, at least 98%, at least 99%, at least 99.5%, or 100% identical to SEQ ID NO: 61 and encodes a FIX protein comprising the sequence set forth in SEQ ID NO: 97. In another example, the other FIX coding sequence is (or comprises a sequence) at least 99%, at least 99.5%, or 100% identical to SEQ ID NO: 61. In another example, the other FIX coding sequence is (or comprises a sequence) at least 99%, at least 99.5%, or 100% identical to SEQ ID NO: 61 and encodes a FIX protein (or a FIX protein comprising a sequence) at least 99%, at least 99.5%, or 100% identical to SEQ ID NO: 97. In another example, the other FIX coding sequence is (or comprises a sequence) at least 99%, at least 99.5%, or 100% identical to SEQ ID NO: 61 and encodes a FIX protein comprising the sequence set forth in SEQ ID NO: 97. In another example, the other FIX coding sequence comprises the sequence set forth in SEQ ID NO: 61. In another example, the other FIX coding sequence consists essentially of the sequence set forth in SEQ ID NO: 61. In another example, the other FIX coding sequence consists of the sequence set forth in SEQ ID NO: 61. The other FIX coding sequence can be, for example, CpG-depleted (e.g., all but one CpG dinucleotides removed or fully CpG-depleted) and/or modified to mutate one or more cryptic splice donor sequences (e.g., all identified cryptic splice donor sequences). For example, the other FIX coding sequence can be CpG depleted (e.g., all but one CpG dinucleotides removed or fully CpG-depleted) and modified to mutate one or more cryptic splice donor sequences (e.g., all identified cryptic splice donor sequences). Optionally, one or both of the FIX coding sequence encodes a FIX protein (or a FIX protein comprising a sequence) at least 90%, at least 91%, at least 92%, at least 93%, at least 94%, at least 95%, at least 96%, at least 97%, at least 98%, at least 99%, at least 99.5%, or 100% identical to SEQ ID NO: 97 (and, e.g., retaining the activity of native FIX). Optionally, one or both of the FIX coding sequence encodes a FIX protein (or a FIX protein comprising a sequence) at least 95%, at least 96%, at least 97%, at least 98%, at least 99%, at least 99.5%, or 100% identical to SEQ ID NO: 97 (and, e.g., retaining the activity of native FIX). Optionally, one or both of the FIX coding sequence in the above examples encodes a FIX protein (or a FIX protein comprising a sequence) at least 99%, at least 99.5%, or 100% identical to SEQ ID NO: 97 (and, e.g., retaining the activity of native FIX). Optionally, one or both of the FIX coding sequence in the above examples encodes a FIX protein comprising the sequence set forth in SEQ ID NO: 97. Optionally, one or both of the FIX coding sequence in the above examples encodes a FIX protein consisting essentially of the sequence set forth in SEQ ID NO: 97. Optionally, one or both of the FIX coding sequence in the above examples encodes a FIX protein consisting of the sequence set forth in SEQ ID NO: 97.

[0665] In another example, the one of the FIX coding sequences is (or comprises a sequence) at least 95%, at least 96%, at least 97%, at least 98%, at least 99%, at least 99.5%, or 100% identical to SEQ ID NO: 68 and encodes a FIX protein comprising the sequence set forth in SEQ ID NO: 97. The one of the FIX coding sequences can be, for example, CpG-depleted (e.g., fully CpG-depleted) and/or codon optimized. For example, the one of the FIX coding sequences can be CpG depleted (e.g., fully CpG-depleted) and codon optimized. In one example, the other FIX coding sequence is (or comprises a sequence) at least 90%, at least 91%, at least 92%, at least 93%, at least 94%, at least 95%, at least 96%, at least 97%, at least 98%, at least 99%, at least 99.5%, or 100% identical to SEQ ID NO: 61. In another example, the other FIX coding sequence is (or comprises a sequence) at least 90%, at least 91%, at least 92%, at least 93%, at least 94%, at least 95%, at least 96%, at least 97%, at least 98%, at least 99%, at least 99.5%, or 100% identical to SEQ ID NO: 61 and encodes a FIX protein (or a FIX protein comprising a sequence) at least 99%, at least 99.5%, or 100% identical to SEQ ID NO: 97. In another example, the other FIX coding sequence is (or comprises a sequence) at least 90%, at least 91%, at least 92%, at least 93%, at least 94%, at least 95%, at least 96%, at least 97%, at least 98%, at least 99%, at least 99.5%, or 100% identical to SEQ ID NO: 61 and encodes a FIX protein comprising the sequence set forth in SEQ ID NO: 97. In another example, the other FIX coding sequence is (or comprises a sequence) at least 95%, at least 96%, at least 97%, at least 98%, at least 99%, at least 99.5%, or 100% identical to SEQ ID NO: 61. In another example, the other FIX coding sequence is (or comprises a sequence) at least 95%, at least 96%, at least 97%, at least 98%, at least 99%, at least 99.5%, or 100% identical to SEQ ID NO: 61 and encodes a FIX protein (or a FIX protein comprising a sequence) at least 99%, at least 99.5%, or 100% identical to SEQ ID NO: 97. In another example, the other FIX coding sequence is (or comprises a sequence) at least 95%, at least 96%, at least 97%, at least 98%, at least 99%, at least 99.5%, or 100% identical to SEQ ID NO: 61 and encodes a FIX protein comprising the sequence set forth in SEQ ID NO: 97. In another example, the other FIX coding sequence is (or comprises a sequence) at least 99%, at least 99.5%, or 100% identical to SEQ ID NO: 61. In another example, the other FIX coding sequence is (or comprises a sequence) at least 99%, at least 99.5%, or 100% identical to SEQ ID NO: 61 and encodes a FIX protein (or a FIX protein comprising a sequence) at least 99%, at least 99.5%, or 100% identical to SEQ ID NO: 97. In another example, the other FIX coding sequence is (or comprises a sequence) at least 99%, at least 99.5%, or 100% identical to SEQ ID NO: 61 and encodes a FIX protein comprising the sequence set forth in SEQ ID NO: 97. In another example, the other FIX coding sequence comprises the sequence set forth in SEQ ID NO: 61. In another example, the other FIX coding sequence consists essentially of the sequence set forth in SEQ ID NO: 61. In another example, the other FIX coding sequence consists of the sequence set forth in SEQ ID NO: 61. The other FIX coding sequence can be, for example, CpG-depleted (e.g., all but one CpG dinucleotides removed or fully CpG-depleted) and/or modified to mutate one or more cryptic splice donor sequences (e.g., all identified cryptic splice donor sequences). For example, the other FIX coding sequence can be CpG depleted (e.g., all but one CpG dinucleotides removed or fully CpG-depleted) and modified to mutate one or more cryptic splice donor sequences (e.g., all identified cryptic splice donor sequences). Optionally, one or both of the FIX coding sequence encodes a FIX protein (or a FIX protein comprising a sequence) at least 90%, at least 91%, at least 92%, at least 93%, at least 94%, at least 95%, at least 96%, at least 97%, at least 98%, at least 99%, at least 99.5%, or 100% identical to SEQ ID NO: 97 (and, e.g., retaining the activity of native FIX). Optionally, one or both of the FIX coding sequence encodes a FIX protein (or a FIX protein comprising a sequence) at least 95%, at least 96%, at least 97%, at least 98%, at least 99%, at least 99.5%, or 100% identical to SEQ ID NO: 97 (and, e.g., retaining the activity of native FIX). Optionally, one or both of the FIX coding sequence in the above examples encodes a FIX protein (or a FIX protein comprising a sequence) at least 99%, at least 99.5%, or 100% identical to SEQ ID NO: 97 (and, e.g., retaining the activity of native FIX). Optionally, one or both of the FIX coding sequence in the above examples encodes a FIX protein comprising the sequence set forth in SEQ ID NO: 97. Optionally, one or both of the FIX coding sequence in the above examples encodes a FIX protein consisting essentially of the sequence set forth in SEQ ID NO: 97. Optionally, one or both of the FIX coding sequence in the above examples encodes a FIX protein consisting of the sequence set forth in SEQ ID NO: 97.

[0666] In another example, the one of the FIX coding sequences is (or comprises a sequence) at least 99%, at least 99.5%, or 100% identical to SEQ ID NO: 68. The one of the FIX coding sequences can be, for example, CpG-depleted (e.g., fully CpG-depleted) and/or codon optimized. For example, the one of the FIX coding sequences can be CpG depleted (e.g., fully CpG-depleted) and codon optimized. In one example, the other FIX coding sequence is (or comprises a sequence) at least 90%, at least 91%, at least 92%, at least 93%, at least 94%, at least 95%, at least 96%, at least 97%, at least 98%, at least 99%, at least 99.5%, or 100% identical to SEQ ID NO: 61. In another example, the other FIX coding sequence is (or comprises a sequence) at least 90%, at least 91%, at least 92%, at least 93%, at least 94%, at least 95%, at least 96%, at least 97%, at least 98%, at least 99%, at least 99.5%, or 100% identical to SEQ ID NO: 61 and encodes a FIX protein (or a FIX protein comprising a sequence) at least 99%, at least 99.5%, or 100% identical to SEQ ID NO: 97. In another example, the other FIX coding sequence is (or comprises a sequence) at least 90%, at least 91%, at least 92%, at least 93%, at least 94%, at least 95%, at least 96%, at least 97%, at least 98%, at least 99%, at least 99.5%, or 100% identical to SEQ ID NO: 61 and encodes a FIX protein comprising the sequence set forth in SEQ ID NO: 97. In another example, the other FIX coding sequence is (or comprises a sequence) at least 95%, at least 96%, at least 97%, at least 98%, at least 99%, at least 99.5%, or 100% identical to SEQ ID NO: 61. In another example, the other FIX coding sequence is (or comprises a sequence) at least 95%, at least 96%, at least 97%, at least 98%, at least 99%, at least 99.5%, or 100% identical to SEQ ID NO: 61 and encodes a FIX protein (or a FIX protein comprising a sequence) at least 99%, at least 99.5%, or 100% identical to SEQ ID NO: 97. In another example, the other FIX coding sequence is (or comprises a sequence) at least 95%, at least 96%, at least 97%, at least 98%, at least 99%, at least 99.5%, or 100% identical to SEQ ID NO: 61 and encodes a FIX protein comprising the sequence set forth in SEQ ID NO: 97. In another example, the other FIX coding sequence is (or comprises a sequence) at least 99%, at least 99.5%, or 100% identical to SEQ ID NO: 61. In another example, the other FIX coding sequence is (or comprises a sequence) at least 99%, at least 99.5%, or 100% identical to SEQ ID NO: 61 and encodes a FIX protein (or a FIX protein comprising a sequence) at least 99%, at least 99.5%, or 100% identical to SEQ ID NO: 97. In another example, the other FIX coding sequence is (or comprises a sequence) at least 99%, at least 99.5%, or 100% identical to SEQ ID NO: 61 and encodes a FIX protein comprising the sequence set forth in SEQ ID NO: 97. In another example, the other FIX coding sequence comprises the sequence set forth in SEQ ID NO: 61. In another example, the other FIX coding sequence consists essentially of the sequence set forth in SEQ ID NO: 61. In another example, the other FIX coding sequence consists of the sequence set forth in SEQ ID NO: 61. The other FIX coding sequence can be, for example, CpG-depleted (e.g., all but one CpG dinucleotides removed or fully CpG-depleted) and/or modified to mutate one or more cryptic splice donor sequences (e.g., all identified cryptic splice donor sequences). For example, the other FIX coding sequence can be CpG depleted (e.g., all but one CpG dinucleotides removed or fully CpG-depleted) and modified to mutate one or more cryptic splice donor sequences (e.g., all identified cryptic splice donor sequences). Optionally, one or both of the FIX coding sequence encodes a FIX protein (or a FIX protein comprising a sequence) at least 90%, at least 91%, at least 92%, at least 93%, at least 94%, at least 95%, at least 96%, at least 97%, at least 98%, at least 99%, at least 99.5%, or 100% identical to SEQ ID NO: 97 (and, e.g., retaining the activity of native FIX). Optionally, one or both of the FIX coding sequence encodes a FIX protein (or a FIX protein comprising a sequence) at least 95%, at least 96%, at least 97%, at least 98%, at least 99%, at least 99.5%, or 100% identical to SEQ ID NO: 97 (and, e.g., retaining the activity of native FIX). Optionally, one or both of the FIX coding sequence in the above examples encodes a FIX protein (or a FIX protein comprising a sequence) at least 99%, at least 99.5%, or 100% identical to SEQ ID NO: 97 (and, e.g., retaining the activity of native FIX). Optionally, one or both of the FIX coding sequence in the above examples encodes a FIX protein comprising the sequence set forth in SEQ ID NO: 97. Optionally, one or both of the FIX coding sequence in the above examples encodes a FIX protein consisting essentially of the sequence set forth in SEQ ID NO: 97. Optionally, one or both of the FIX coding sequence in the above examples encodes a FIX protein consisting of the sequence set forth in SEQ ID NO: 97.

[0667] In another example, the one of the FIX coding sequences is (or comprises a sequence) at least 99%, at least 99.5%, or 100% identical to SEQ ID NO: 68 and encodes a FIX protein (or a FIX protein comprising a sequence) at least 99%, at least 99.5%, or 100% identical to SEQ ID NO: 97. The one of the FIX coding sequences can be, for example, CpG-depleted (e.g., fully CpG-depleted) and/or codon optimized. For example, the one of the FIX coding sequences can be CpG depleted (e.g., fully CpG-depleted) and codon optimized. In one example, the other FIX coding sequence is (or comprises a sequence) at least 90%, at least 91%, at least 92%, at least 93%, at least 94%, at least 95%, at least 96%, at least 97%, at least 98%, at least 99%, at least 99.5%, or 100% identical to SEQ ID NO: 61. In another example, the other FIX coding sequence is (or comprises a sequence) at least 90%, at least 91%, at least 92%, at least 93%, at least 94%, at least 95%, at least 96%, at least 97%, at least 98%, at least 99%, at least 99.5%, or 100% identical to SEQ ID NO: 61 and encodes a FIX protein (or a FIX protein comprising a sequence) at least 99%, at least 99.5%, or 100% identical to SEQ ID NO: 97. In another example, the other FIX coding sequence is (or comprises a sequence) at least 90%, at least 91%, at least 92%, at least 93%, at least 94%, at least 95%, at least 96%, at least 97%, at least 98%, at least 99%, at least 99.5%, or 100% identical to SEQ ID NO: 61 and encodes a FIX protein comprising the sequence set forth in SEQ ID NO: 97. In another example, the other FIX coding sequence is (or comprises a sequence) at least 95%, at least 96%, at least 97%, at least 98%, at least 99%, at least 99.5%, or 100% identical to SEQ ID NO: 61. In another example, the other FIX coding sequence is (or comprises a sequence) at least 95%, at least 96%, at least 97%, at least 98%, at least 99%, at least 99.5%, or 100% identical to SEQ ID NO: 61 and encodes a FIX protein (or a FIX protein comprising a sequence) at least 99%, at least 99.5%, or 100% identical to SEQ ID NO: 97. In another example, the other FIX coding sequence is (or comprises a sequence) at least 95%, at least 96%, at least 97%, at least 98%, at least 99%, at least 99.5%, or 100% identical to SEQ ID NO: 61 and encodes a FIX protein comprising the sequence set forth in SEQ ID NO: 97. In another example, the other FIX coding sequence is (or comprises a sequence) at least 99%, at least 99.5%, or 100% identical to SEQ ID NO: 61. In another example, the other FIX coding sequence is (or comprises a sequence) at least 99%, at least 99.5%, or 100% identical to SEQ ID NO: 61 and encodes a FIX protein (or a FIX protein comprising a sequence) at least 99%, at least 99.5%, or 100% identical to SEQ ID NO: 97. In another example, the other FIX coding sequence is (or comprises a sequence) at least 99%, at least 99.5%, or 100% identical to SEQ ID NO: 61 and encodes a FIX protein comprising the sequence set forth in SEQ ID NO: 97. In another example, the other FIX coding sequence comprises the sequence set forth in SEQ ID NO: 61. In another example, the other FIX coding sequence consists essentially of the sequence set forth in SEQ ID NO: 61. In another example, the other FIX coding sequence consists of the sequence set forth in SEQ ID NO: 61. The other FIX coding sequence can be, for example, CpG-depleted (e.g., all but one CpG dinucleotides removed or fully CpG-depleted) and/or modified to mutate one or more cryptic splice donor sequences (e.g., all identified cryptic splice donor sequences). For example, the other FIX coding sequence can be CpG depleted (e.g., all but one CpG dinucleotides removed or fully CpG-depleted) and modified to mutate one or more cryptic splice donor sequences (e.g., all identified cryptic splice donor sequences). Optionally, one or both of the FIX coding sequence encodes a FIX protein (or a FIX protein comprising a sequence) at least 90%, at least 91%, at least 92%, at least 93%, at least 94%, at least 95%, at least 96%, at least 97%, at least 98%, at least 99%, at least 99.5%, or 100% identical to SEQ ID NO: 97 (and, e.g., retaining the activity of native FIX). Optionally, one or both of the FIX coding sequence encodes a FIX protein (or a FIX protein comprising a sequence) at least 95%, at least 96%, at least 97%, at least 98%, at least 99%, at least 99.5%, or 100% identical to SEQ ID NO: 97 (and, e.g., retaining the activity of native FIX). Optionally, one or both of the FIX coding sequence in the above examples encodes a FIX protein (or a FIX protein comprising a sequence) at least 99%, at least 99.5%, or 100% identical to SEQ ID NO: 97 (and, e.g., retaining the activity of native FIX). Optionally, one or both of the FIX coding sequence in the above examples encodes a FIX protein comprising the sequence set forth in SEQ ID NO: 97. Optionally, one or both of the FIX coding sequence in the above examples encodes a FIX protein consisting essentially of the sequence set forth in SEQ ID NO: 97. Optionally, one or both of the FIX coding sequence in the above examples encodes a FIX protein consisting of the sequence set forth in SEQ ID NO: 97.

[0668] In another example, the one of the FIX coding sequences is (or comprises a sequence) at least 99%, at least 99.5%, or 100% identical to SEQ ID NO: 68 and encodes a FIX protein comprising the sequence set forth in SEQ ID NO: 97. The one of the FIX coding sequences can be, for example, CpG-depleted (e.g., fully CpG-depleted) and/or codon optimized. For example, the one of the FIX coding sequences can be CpG depleted (e.g., fully CpG-depleted) and codon optimized. In one example, the other FIX coding sequence is (or comprises a sequence) at least 90%, at least 91%, at least 92%, at least 93%, at least 94%, at least 95%, at least 96%, at least 97%, at least 98%, at least 99%, at least 99.5%, or 100% identical to SEQ ID NO: 61. In another example, the other FIX coding sequence is (or comprises a sequence) at least 90%, at least 91%, at least 92%, at least 93%, at least 94%, at least 95%, at least 96%, at least 97%, at least 98%, at least 99%, at least 99.5%, or 100% identical to SEQ ID NO: 61 and encodes a FIX protein (or a FIX protein comprising a sequence) at least 99%, at least 99.5%, or 100% identical to SEQ ID NO: 97. In another example, the other FIX coding sequence is (or comprises a sequence) at least 90%, at least 91%, at least 92%, at least 93%, at least 94%, at least 95%, at least 96%, at least 97%, at least 98%, at least 99%, at least 99.5%, or 100% identical to SEQ ID NO: 61 and encodes a FIX protein comprising the sequence set forth in SEQ ID NO: 97. In another example, the other FIX coding sequence is (or comprises a sequence) at least 95%, at least 96%, at least 97%, at least 98%, at least 99%, at least 99.5%, or 100% identical to SEQ ID NO: 61. In another example, the other FIX coding sequence is (or comprises a sequence) at least 95%, at least 96%, at least 97%, at least 98%, at least 99%, at least 99.5%, or 100% identical to SEQ ID NO: 61 and encodes a FIX protein (or a FIX protein comprising a sequence) at least 99%, at least 99.5%, or 100% identical to SEQ ID NO: 97. In another example, the other FIX coding sequence is (or comprises a sequence) at least 95%, at least 96%, at least 97%, at least 98%, at least 99%, at least 99.5%, or 100% identical to SEQ ID NO: 61 and encodes a FIX protein comprising the sequence set forth in SEQ ID NO: 97. In another example, the other FIX coding sequence is (or comprises a sequence) at least 99%, at least 99.5%, or 100% identical to SEQ ID NO: 61. In another example, the other FIX coding sequence is (or comprises a sequence) at least 99%, at least 99.5%, or 100% identical to SEQ ID NO: 61 and encodes a FIX protein (or a FIX protein comprising a sequence) at least 99%, at least 99.5%, or 100% identical to SEQ ID NO: 97. In another example, the other FIX coding sequence is (or comprises a sequence) at least 99%, at least 99.5%, or 100% identical to SEQ ID NO: 61 and encodes a FIX protein comprising the sequence set forth in SEQ ID NO: 97. In another example, the other FIX coding sequence comprises the sequence set forth in SEQ ID NO: 61. In another example, the other FIX coding sequence consists essentially of the sequence set forth in SEQ ID NO: 61. In another example, the other FIX coding sequence consists of the sequence set forth in SEQ ID NO: 61. The other FIX coding sequence can be, for example, CpG-depleted (e.g., all but one CpG dinucleotides removed or fully CpG-depleted) and/or modified to mutate one or more cryptic splice donor sequences (e.g., all identified cryptic splice donor sequences). For example, the other FIX coding sequence can be CpG depleted (e.g., all but one CpG dinucleotides removed or fully CpG-depleted) and modified to mutate one or more cryptic splice donor sequences (e.g., all identified cryptic splice donor sequences). Optionally, one or both of the FIX coding sequence encodes a FIX protein (or a FIX protein comprising a sequence) at least 90%, at least 91%, at least 92%, at least 93%, at least 94%, at least 95%, at least 96%, at least 97%, at least 98%, at least 99%, at least 99.5%, or 100% identical to SEQ ID NO: 97 (and, e.g., retaining the activity of native FIX). Optionally, one or both of the FIX coding sequence encodes a FIX protein (or a FIX protein comprising a sequence) at least 95%, at least 96%, at least 97%, at least 98%, at least 99%, at least 99.5%, or 100% identical to SEQ ID NO: 97 (and, e.g., retaining the activity of native FIX). Optionally, one or both of the FIX coding sequence in the above examples encodes a FIX protein (or a FIX protein comprising a sequence) at least 99%, at least 99.5%, or 100% identical to SEQ ID NO: 97 (and, e.g., retaining the activity of native FIX). Optionally, one or both of the FIX coding sequence in the above examples encodes a FIX protein comprising the sequence set forth in SEQ ID NO: 97. Optionally, one or both of the FIX coding sequence in the above examples encodes a FIX protein consisting essentially of the sequence set forth in SEQ ID NO: 97. Optionally, one or both of the FIX coding sequence in the above examples encodes a FIX protein consisting of the sequence set forth in SEQ ID NO: 97.

[0669] In another example, the one of the FIX coding sequences comprises the sequence set forth in SEQ ID NO: 68. The one of the FIX coding sequences can be, for example, CpG-depleted (e.g., fully CpG-depleted) and/or codon optimized. For example, the one of the FIX coding sequences can be CpG depleted (e.g., fully CpG-depleted) and codon optimized. In one example, the other FIX coding sequence is (or comprises a sequence) at least 90%, at least 91%, at least 92%, at least 93%, at least 94%, at least 95%, at least 96%, at least 97%, at least 98%, at least 99%, at least 99.5%, or 100% identical to SEQ ID NO: 61. In another example, the other FIX coding sequence is (or comprises a sequence) at least 90%, at least 91%, at least 92%, at least 93%, at least 94%, at least 95%, at least 96%, at least 97%, at least 98%, at least 99%, at least 99.5%, or 100% identical to SEQ ID NO: 61 and encodes a FIX protein (or a FIX protein comprising a sequence) at least 99%, at least 99.5%, or 100% identical to SEQ ID NO: 97. In another example, the other FIX coding sequence is (or comprises a sequence) at least 90%, at least 91%, at least 92%, at least 93%, at least 94%, at least 95%, at least 96%, at least 97%, at least 98%, at least 99%, at least 99.5%, or 100% identical to SEQ ID NO: 61 and encodes a FIX protein comprising the sequence set forth in SEQ ID NO: 97. In another example, the other FIX coding sequence is (or comprises a sequence) at least 95%, at least 96%, at least 97%, at least 98%, at least 99%, at least 99.5%, or 100% identical to SEQ ID NO: 61. In another example, the other FIX coding sequence is (or comprises a sequence) at least 95%, at least 96%, at least 97%, at least 98%, at least 99%, at least 99.5%, or 100% identical to SEQ ID NO: 61 and encodes a FIX protein (or a FIX protein comprising a sequence) at least 99%, at least 99.5%, or 100% identical to SEQ ID NO: 97. In another example, the other FIX coding sequence is (or comprises a sequence) at least 95%, at least 96%, at least 97%, at least 98%, at least 99%, at least 99.5%, or 100% identical to SEQ ID NO: 61 and encodes a FIX protein comprising the sequence set forth in SEQ ID NO: 97. In another example, the other FIX coding sequence is (or comprises a sequence) at least 99%, at least 99.5%, or 100% identical to SEQ ID NO: 61. In another example, the other FIX coding sequence is (or comprises a sequence) at least 99%, at least 99.5%, or 100% identical to SEQ ID NO: 61 and encodes a FIX protein (or a FIX protein comprising a sequence) at least 99%, at least 99.5%, or 100% identical to SEQ ID NO: 97. In another example, the other FIX coding sequence is (or comprises a sequence) at least 99%, at least 99.5%, or 100% identical to SEQ ID NO: 61 and encodes a FIX protein comprising the sequence set forth in SEQ ID NO: 97. In another example, the other FIX coding sequence comprises the sequence set forth in SEQ ID NO: 61. In another example, the other FIX coding sequence consists essentially of the sequence set forth in SEQ ID NO: 61. In another example, the other FIX coding sequence consists of the sequence set forth in SEQ ID NO: 61. The other FIX coding sequence can be, for example, CpG-depleted (e.g., all but one CpG dinucleotides removed or fully CpG-depleted) and/or modified to mutate one or more cryptic splice donor sequences (e.g., all identified cryptic splice donor sequences). For example, the other FIX coding sequence can be CpG depleted (e.g., all but one CpG dinucleotides removed or fully CpG-depleted) and modified to mutate one or more cryptic splice donor sequences (e.g., all identified cryptic splice donor sequences). Optionally, one or both of the FIX coding sequence encodes a FIX protein (or a FIX protein comprising a sequence) at least 90%, at least 91%, at least 92%, at least 93%, at least 94%, at least 95%, at least 96%, at least 97%, at least 98%, at least 99%, at least 99.5%, or 100% identical to SEQ ID NO: 97 (and, e.g., retaining the activity of native FIX). Optionally, one or both of the FIX coding sequence encodes a FIX protein (or a FIX protein comprising a sequence) at least 95%, at least 96%, at least 97%, at least 98%, at least 99%, at least 99.5%, or 100% identical to SEQ ID NO: 97 (and, e.g., retaining the activity of native FIX). Optionally, one or both of the FIX coding sequence in the above examples encodes a FIX protein (or a FIX protein comprising a sequence) at least 99%, at least 99.5%, or 100% identical to SEQ ID NO: 97 (and, e.g., retaining the activity of native FIX). Optionally, one or both of the FIX coding sequence in the above examples encodes a FIX protein comprising the sequence set forth in SEQ ID NO: 97. Optionally, one or both of the FIX coding sequence in the above examples encodes a FIX protein consisting essentially of the sequence set forth in SEQ ID NO: 97. Optionally, one or both of the FIX coding sequence in the above examples encodes a FIX protein consisting of the sequence set forth in SEQ ID NO: 97.

[0670] In another example, the one of the FIX coding sequences consists essentially of the sequence set forth in SEQ ID NO: 68. The one of the FIX coding sequences can be, for example, CpG-depleted (e.g., fully CpG-depleted) and/or codon optimized. For example, the one of the FIX coding sequences can be CpG depleted (e.g., fully CpG-depleted) and codon optimized. In one example, the other FIX coding sequence is (or comprises a sequence) at least 90%, at least 91%, at least 92%, at least 93%, at least 94%, at least 95%, at least 96%, at least 97%, at least 98%, at least 99%, at least 99.5%, or 100% identical to SEQ ID NO: 61. In another example, the other FIX coding sequence is (or comprises a sequence) at least 90%, at least 91%, at least 92%, at least 93%, at least 94%, at least 95%, at least 96%, at least 97%, at least 98%, at least 99%, at least 99.5%, or 100% identical to SEQ ID NO: 61 and encodes a FIX protein (or a FIX protein comprising a sequence) at least 99%, at least 99.5%, or 100% identical to SEQ ID NO: 97. In another example, the other FIX coding sequence is (or comprises a sequence) at least 90%, at least 91%, at least 92%, at least 93%, at least 94%, at least 95%, at least 96%, at least 97%, at least 98%, at least 99%, at least 99.5%, or 100% identical to SEQ ID NO: 61 and encodes a FIX protein comprising the sequence set forth in SEQ ID NO: 97. In another example, the other FIX coding sequence is (or comprises a sequence) at least 95%, at least 96%, at least 97%, at least 98%, at least 99%, at least 99.5%, or 100% identical to SEQ ID NO: 61. In another example, the other FIX coding sequence is (or comprises a sequence) at least 95%, at least 96%, at least 97%, at least 98%, at least 99%, at least 99.5%, or 100% identical to SEQ ID NO: 61 and encodes a FIX protein (or a FIX protein comprising a sequence) at least 99%, at least 99.5%, or 100% identical to SEQ ID NO: 97. In another example, the other FIX coding sequence is (or comprises a sequence) at least 95%, at least 96%, at least 97%, at least 98%, at least 99%, at least 99.5%, or 100% identical to SEQ ID NO: 61 and encodes a FIX protein comprising the sequence set forth in SEQ ID NO: 97. In another example, the other FIX coding sequence is (or comprises a sequence) at least 99%, at least 99.5%, or 100% identical to SEQ ID NO: 61. In another example, the other FIX coding sequence is (or comprises a sequence) at least 99%, at least 99.5%, or 100% identical to SEQ ID NO: 61 and encodes a FIX protein (or a FIX protein comprising a sequence) at least 99%, at least 99.5%, or 100% identical to SEQ ID NO: 97. In another example, the other FIX coding sequence is (or comprises a sequence) at least 99%, at least 99.5%, or 100% identical to SEQ ID NO: 61 and encodes a FIX protein comprising the sequence set forth in SEQ ID NO: 97. In another example, the other FIX coding sequence comprises the sequence set forth in SEQ ID NO: 61. In another example, the other FIX coding sequence consists essentially of the sequence set forth in SEQ ID NO: 61. In another example, the other FIX coding sequence consists of the sequence set forth in SEQ ID NO: 61. The other FIX coding sequence can be, for example, CpG-depleted (e.g., all but one CpG dinucleotides removed or fully CpG-depleted) and/or modified to mutate one or more cryptic splice donor sequences (e.g., all identified cryptic splice donor sequences). For example, the other FIX coding sequence can be CpG depleted (e.g., all but one CpG dinucleotides removed or fully CpG-depleted) and modified to mutate one or more cryptic splice donor sequences (e.g., all identified cryptic splice donor sequences). Optionally, one or both of the FIX coding sequence encodes a FIX protein (or a FIX protein comprising a sequence) at least 90%, at least 91%, at least 92%, at least 93%, at least 94%, at least 95%, at least 96%, at least 97%, at least 98%, at least 99%, at least 99.5%, or 100% identical to SEQ ID NO: 97 (and, e.g., retaining the activity of native FIX). Optionally, one or both of the FIX coding sequence encodes a FIX protein (or a FIX protein comprising a sequence) at least 95%, at least 96%, at least 97%, at least 98%, at least 99%, at least 99.5%, or 100% identical to SEQ ID NO: 97 (and, e.g., retaining the activity of native FIX). Optionally, one or both of the FIX coding sequence in the above examples encodes a FIX protein (or a FIX protein comprising a sequence) at least 99%, at least 99.5%, or 100% identical to SEQ ID NO: 97 (and, e.g., retaining the activity of native FIX). Optionally, one or both of the FIX coding sequence in the above examples encodes a FIX protein comprising the sequence set forth in SEQ ID NO: 97. Optionally, one or both of the FIX coding sequence in the above examples encodes a FIX protein consisting essentially of the sequence set forth in SEQ ID NO: 97. Optionally, one or both of the FIX coding sequence in the above examples encodes a FIX protein consisting of the sequence set forth in SEQ ID NO: 97.

[0671] In another example, the one of the FIX coding sequences consists of the sequence set forth in SEQ ID NO: 68. The one of the FIX coding sequences can be, for example, CpG-depleted (e.g., fully CpG-depleted) and/or codon optimized. For example, the one of the FIX coding sequences can be CpG depleted (e.g., fully CpG-depleted) and codon optimized. In one example, the other FIX coding sequence is (or comprises a sequence) at least 90%, at least 91%, at least 92%, at least 93%, at least 94%, at least 95%, at least 96%, at least 97%, at least 98%, at least 99%, at least 99.5%, or 100% identical to SEQ ID NO: 61. In another example, the other FIX coding sequence is (or comprises a sequence) at least 90%, at least 91%, at least 92%, at least 93%, at least 94%, at least 95%, at least 96%, at least 97%, at least 98%, at least 99%, at least 99.5%, or 100% identical to SEQ ID NO: 61 and encodes a FIX protein (or a FIX protein comprising a sequence) at least 99%, at least 99.5%, or 100% identical to SEQ ID NO: 97. In another example, the other FIX coding sequence is (or comprises a sequence) at least 90%, at least 91%, at least 92%, at least 93%, at least 94%, at least 95%, at least 96%, at least 97%, at least 98%, at least 99%, at least 99.5%, or 100% identical to SEQ ID NO: 61 and encodes a FIX protein comprising the sequence set forth in SEQ ID NO: 97. In another example, the other FIX coding sequence is (or comprises a sequence) at least 95%, at least 96%, at least 97%, at least 98%, at least 99%, at least 99.5%, or 100% identical to SEQ ID NO: 61. In another example, the other FIX coding sequence is (or comprises a sequence) at least 95%, at least 96%, at least 97%, at least 98%, at least 99%, at least 99.5%, or 100% identical to SEQ ID NO: 61 and encodes a FIX protein (or a FIX protein comprising a sequence) at least 99%, at least 99.5%, or 100% identical to SEQ ID NO: 97. In another example, the other FIX coding sequence is (or comprises a sequence) at least 95%, at least 96%, at least 97%, at least 98%, at least 99%, at least 99.5%, or 100% identical to SEQ ID NO: 61 and encodes a FIX protein comprising the sequence set forth in SEQ ID NO: 97. In another example, the other FIX coding sequence is (or comprises a sequence) at least 99%, at least 99.5%, or 100% identical to SEQ ID NO: 61. In another example, the other FIX coding sequence is (or comprises a sequence) at least 99%, at least 99.5%, or 100% identical to SEQ ID NO: 61 and encodes a FIX protein (or a FIX protein comprising a sequence) at least 99%, at least 99.5%, or 100% identical to SEQ ID NO: 97. In another example, the other FIX coding sequence is (or comprises a sequence) at least 99%, at least 99.5%, or 100% identical to SEQ ID NO: 61 and encodes a FIX protein comprising the sequence set forth in SEQ ID NO: 97. In another example, the other FIX coding sequence comprises the sequence set forth in SEQ ID NO: 61. In another example, the other FIX coding sequence consists essentially of the sequence set forth in SEQ ID NO: 61. In another example, the other FIX coding sequence consists of the sequence set forth in SEQ ID NO: 61. The other FIX coding sequence can be, for example, CpG-depleted (e.g., all but one CpG dinucleotides removed or fully CpG-depleted) and/or modified to mutate one or more cryptic splice donor sequences (e.g., all identified cryptic splice donor sequences). For example, the other FIX coding sequence can be CpG depleted (e.g., all but one CpG dinucleotides removed or fully CpG-depleted) and modified to mutate one or more cryptic splice donor sequences (e.g., all identified cryptic splice donor sequences). Optionally, one or both of the FIX coding sequence encodes a FIX protein (or a FIX protein comprising a sequence) at least 90%, at least 91%, at least 92%, at least 93%, at least 94%, at least 95%, at least 96%, at least 97%, at least 98%, at least 99%, at least 99.5%, or 100% identical to SEQ ID NO: 97 (and, e.g., retaining the activity of native FIX). Optionally, one or both of the FIX coding sequence encodes a FIX protein (or a FIX protein comprising a sequence) at least 95%, at least 96%, at least 97%, at least 98%, at least 99%, at least 99.5%, or 100% identical to SEQ ID NO: 97 (and, e.g., retaining the activity of native FIX). Optionally, one or both of the FIX coding sequence in the above examples encodes a FIX protein (or a FIX protein comprising a sequence) at least 99%, at least 99.5%, or 100% identical to SEQ ID NO: 97 (and, e.g., retaining the activity of native FIX). Optionally, one or both of the FIX coding sequence in the above examples encodes a FIX protein comprising the sequence set forth in SEQ ID NO: 97. Optionally, one or both of the FIX coding sequence in the above examples encodes a FIX protein consisting essentially of the sequence set forth in SEQ ID NO: 97. Optionally, one or both of the FIX coding sequence in the above examples encodes a FIX protein consisting of the sequence set forth in SEQ ID NO: 97.

[0672] In a particular example, an exemplary bidirectional construct comprises a sequence at least 90%, at least 91%, at least 92%, at least 93%, at least 94%, at least 95%, at least 96%, at least 97%, at least 98%, at least 99%, at least 99.5%, or 100% identical to any one of SEQ ID NOS: 101-123 or 74-96. In another particular example, an exemplary bidirectional construct comprises a sequence at least 95%, at least 96%, at least 97%, at least 98%, at least 99%, at least 99.5%, or 100% identical to any one of SEQ ID NOS: 101-123 or 74-96. In another particular example, an exemplary bidirectional construct comprises a sequence at least 99%, at least 99.5%, or 100% identical to any one of SEQ ID NOS: 101-123 or 74-96. In another particular example, an exemplary bidirectional construct comprises any one of SEQ ID NOS: 101-123 or 74-96. In another particular example, an exemplary bidirectional construct consists essentially of any one of SEQ ID NOS: 101-123 or 74-96. In another particular example, an exemplary bidirectional construct consists of any one of SEQ ID NOS: 101-123 or 74-96.

[0673] In a particular example, an exemplary bidirectional construct comprises a sequence at least 90%, at least 91%, at least 92%, at least 93%, at least 94%, at least 95%, at least 96%, at least 97%, at least 98%, at least 99%, at least 99.5%, or 100% identical to any one of SEQ ID NOS: 102-123 or 75-96. In another particular example, an exemplary bidirectional construct comprises a sequence at least 95%, at least 96%, at least 97%, at least 98%, at least 99%, at least 99.5%, or 100% identical to any one of SEQ ID NOS: 102-123 or 75-96. In another particular example, an exemplary bidirectional construct comprises a sequence at least 99%, at least 99.5%, or 100% identical to any one of SEQ ID NOS: 102-123 or 75-96. In another particular example, an exemplary bidirectional construct comprises any one of SEQ ID NOS: 102-123 or 75-96. In another particular example, an exemplary bidirectional construct consists essentially of any one of SEQ ID NOS: 102-123 or 75-96. In another particular example, an exemplary bidirectional construct consists of any one of SEQ ID NOS: 102-123 or 75-96.

[0674] In a particular example, an exemplary bidirectional construct comprises a sequence at least 90%, at least 91%, at least 92%, at least 93%, at least 94%, at least 95%, at least 96%, at least 97%, at least 98%, at least 99%, at least 99.5%, or 100% identical to any one of SEQ ID NOS: 103-123 or 76-96. In another particular example, an exemplary bidirectional construct comprises a sequence at least 95%, at least 96%, at least 97%, at least 98%, at least 99%, at least 99.5%, or 100% identical to any one of SEQ ID NOS: 103-123 or 76-96. In another particular example, an exemplary bidirectional construct comprises a sequence at least 99%, at least 99.5%, or 100% identical to any one of SEQ ID NOS: 103-123 or 76-96. In another particular example, an exemplary bidirectional construct comprises any one of SEQ ID NOS: 103-123 or 76-96. In another particular example, an exemplary bidirectional construct consists essentially of any one of SEQ ID NOS: 103-123 or 76-96. In another particular example, an exemplary bidirectional construct consists of any one of SEQ ID NOS: 103-123 or 76-96.

[0675] In a particular example, an exemplary bidirectional construct comprises a sequence at least 90%, at least 91%, at least 92%, at least 93%, at least 94%, at least 95%, at least 96%, at least 97%, at least 98%, at least 99%, at least 99.5%, or 100% identical to SEQ ID NO: 109 or 108 or 82 or 81. In another particular example, an exemplary bidirectional construct comprises a sequence at least 95%, at least 96%, at least 97%, at least 98%, at least 99%, at least 99.5%, or 100% identical to SEQ ID NO: 109 or 108 or 82 or 81. In another particular example, an exemplary bidirectional construct comprises a sequence at least 99%, at least 99.5%, or 100% identical to SEQ ID NO: 109 or 108 or 82 or 81. In another particular example, an exemplary bidirectional construct comprises SEQ ID NO: 109 or 108 or 82 or 81. In another particular example, an exemplary bidirectional construct consists essentially of SEQ ID NO: 109 or 108 or 82 or 81. In another particular example, an exemplary bidirectional construct consists of SEQ ID NO: 109 or 108 or 82 or 81.

[0676] In a particular example, an exemplary bidirectional construct comprises a sequence at least 90%, at least 91%, at least 92%, at least 93%, at least 94%, at least 95%, at least 96%, at least 97%, at least 98%, at least 99%, at least 99.5%, or 100% identical to SEQ ID NO: 109 or 82. In another particular example, an exemplary bidirectional construct comprises a sequence at least 95%, at least 96%, at least 97%, at least 98%, at least 99%, at least 99.5%, or 100% identical to SEQ ID NO: 109 or 82. In another particular example, an exemplary bidirectional construct comprises a sequence at least 99%, at least 99.5%, or 100% identical to SEQ ID NO: 109 or 82. In another particular example, an exemplary bidirectional construct comprises SEQ ID NO: 109 or 82. In another particular example, an exemplary bidirectional construct consists essentially of SEQ ID NO: 109 or 82. In another particular example, an exemplary bidirectional construct consists of SEQ ID NO: 109 or 82.

[0677] In a particular example, an exemplary bidirectional construct comprises a sequence at least 90%, at least 91%, at least 92%, at least 93%, at least 94%, at least 95%, at least 96%, at least 97%, at least 98%, at least 99%, at least 99.5%, or 100% identical to SEQ ID NO: 109. In another particular example, an exemplary bidirectional construct comprises a sequence at least 95%, at least 96%, at least 97%, at least 98%, at least 99%, at least 99.5%, or 100% identical to SEQ ID NO: 109. In another particular example, an exemplary bidirectional construct comprises a sequence at least 99%, at least 99.5%, or 100% identical to SEQ ID NO: 109. In another particular example, an exemplary bidirectional construct comprises SEQ ID NO: 109. In another particular example, an exemplary bidirectional construct consists essentially of SEQ ID NO: 109. In another particular example, an exemplary bidirectional construct consists of SEQ ID NO: 109.

[0678] In a particular example, an exemplary bidirectional construct comprises a sequence at least 90%, at least 91%, at least 92%, at least 93%, at least 94%, at least 95%, at least 96%, at least 97%, at least 98%, at least 99%, at least 99.5%, or 100% identical to SEQ ID NO: 82. In another particular example, an exemplary bidirectional construct comprises a sequence at least 95%, at least 96%, at least 97%, at least 98%, at least 99%, at least 99.5%, or 100% identical to SEQ ID NO: 82. In another particular example, an exemplary bidirectional construct comprises a sequence at least 99%, at least 99.5%, or 100% identical to SEQ ID NO: 82. In another particular example, an exemplary bidirectional construct comprises SEQ ID NO: 82. In another particular example, an exemplary bidirectional construct consists essentially of SEQ ID NO: 82. In another particular example, an exemplary bidirectional construct consists of SEQ ID NO: 82.

[0679] The F9 nucleic acid constructs disclosed herein can be unidirectional constructs.

[0680] When specific unidirectional construct sequences are disclosed herein, they are meant to encompass the sequence disclosed or the reverse complement of the sequence. For example, if a unidirectional construct disclosed herein consists of the hypothetical sequence 5′-CTGGACCGA-3′, it is also meant to encompass the reverse complement of that sequence (5′-TCGGTCCAG-3′). Likewise, when unidirectional construct elements are disclosed herein in a specific 5′ to 3′ order, they are also meant to encompass the reverse complement of the order of those elements. One reason for this is that, in many embodiments disclosed herein, the unidirectional constructs are part of a single-stranded recombinant AAV vector. Single-stranded AAV genomes are packaged as either sense (plus-stranded) or anti-sense (minus-stranded genomes), and single-stranded AAV genomes of + and − polarity are packaged with equal frequency into mature rAAV virions. See, e.g., LING et al. (2015) J. Mol. Genet. Med. 9(3):175, Zhou et al. (2008) Mol. Ther. 16(3):494-499, and Samulski et al. (1987) J. Virol. 61:3096-3101, each of which is herein incorporated by reference in its entirety for all purposes.

[0681] In the unidirectional constructs, the FIX coding sequence can be a wild type FIX coding sequence without further modification. In the unidirectional constructs, the FIX coding sequence can be codon-optimized for expression in a host cell. For example, the FIX coding sequence can be codon optimized or may use one or more alternative codons for one or more amino acids of the FIX (i.e., same amino acid sequence). An alternative codon as used herein refers to variations in codon usage for a given amino acid, and may or may not be a preferred or optimized codon (codon optimized) for a given expression system. Preferred codon usage, or codons that are well-tolerated in a given system of expression, are known.

[0682] The unidirectional constructs disclosed herein can be modified to include any suitable structural feature as needed for any particular use and/or that confers one or more desired functions. For example, the unidirectional nucleic acid constructs disclosed herein need not comprise a homology arm and/or can be, for example, homology-independent donor constructs.

[0683] In some cases, the unidirectional nucleic acid construct does not comprise a promoter that drives the expression of FIX. For example, the expression of FIX can be driven by a promoter of the host cell (e.g., the endogenous ALB promoter when the transgene is integrated into a host cell's ALB locus). In other cases, the unidirectional nucleic acid construct can comprise one or more promoters operably linked to the FIX coding sequence. That is, although not required for expression, the constructs disclosed herein may also include transcriptional or translational regulatory sequences such as promoters, enhancers, insulators, internal ribosome entry sites, additional sequences encoding peptides, and/or polyadenylation signals. Some unidirectional constructs can comprise a promoter that drives expression of the FIX coding sequence.

[0684] The unidirectional constructs can, in some cases, comprise one or more polyadenylation tail sequences or polyadenylation signal sequences. Some unidirectional constructs can comprise a polyadenylation signal sequence located 3′ of the FIX coding sequence. In a specific example, the polyadenylation signal is a simian virus 40 (SV40) late polyadenylation signal (or a variant thereof). In another specific example, the polyadenylation signal is a bovine growth hormone (BGH) polyadenylation signal (or a variant thereof). In another specific example, the polyadenylation signal is a CpG-depleted BGH polyadenylation signal. For example, the polyadenylation signal can be an SV40 polyadenylation signal or a CpG-depleted BGH polyadenylation signal. In a specific example, the polyadenylation signal can comprise, consist essentially of, or consist of SEQ ID NO: 98. In another specific example, the polyadenylation signal can comprise, consist essentially of, or consist of SEQ ID NO: 99.

[0685] Methods of designing a suitable polyadenylation tail sequence are known. For example, some unidirectional constructs comprise a polyadenylation tail sequence and/or a polyadenylation signal sequence downstream of an open reading frame (i.e., a polyadenylation tail sequence and/or a polyadenylation signal sequence 3′ of a coding sequence). The polyadenylation tail sequence can be encoded, for example, as a “poly-A” stretch downstream of the FIX coding sequence (or other protein coding sequence) in the first and/or second segment. A poly-A tail can comprise, for example, at least 20, 30, 40, 50, 60, 70, 80, 90, or 100 adenines, and optionally up to 300 adenines. In a specific example, the poly-A tail comprises 95, 96, 97, 98, 99, or 100 adenine nucleotides. Methods of designing a suitable polyadenylation tail sequence and/or polyadenylation signal sequence are well known. For example, the polyadenylation signal sequence AAUAAA is commonly used in mammalian systems, although variants such as UAUAAA or AU/GUAAA have been identified. See, e.g., Proudfoot (2011) Genes & Dev. 25(17):1770-82, herein incorporated by reference in its entirety for all purposes.

[0686] The unidirectional constructs can, in some cases, comprise one or more splice acceptor sites. Some unidirectional constructs comprise a splice acceptor site located 5′ of the FIX coding sequence. In a specific example, the splice acceptor is a mouse Alb exon 2 splice acceptor. In a specific example, the splice acceptor can comprise, consist essentially of, or consist of SEQ ID NO: 100.

[0687] The splice acceptor site can, for example, comprise NAG or consist of NAG. In a specific example, the splice acceptor is an ALB splice acceptor (e.g., an ALB splice acceptor used in the splicing together of exons 1 and 2 of ALB (i.e., ALB exon 2 splice acceptor)). For example, such a splice acceptor can be derived from the human ALB gene. In another example, the splice acceptor can be derived from the mouse Alb gene (e.g., an ALB splice acceptor used in the splicing together of exons 1 and 2 of mouse Alb (i.e., mouse Alb exon 2 splice acceptor)). In another example, the splice acceptor is a F9 splice acceptor (e.g., the F9 splice acceptor used in the splicing together of exons 1 and 2 of F9). For example, such a splice acceptor can be derived from the human F9 gene. Alternatively, such a splice acceptor can be derived from the mouse F9 gene. Additional suitable splice acceptor sites useful in eukaryotes, including artificial splice acceptors, are known. See, e.g., Shapiro et al. (1987) Nucleic Acids Res. 15:7155-7174 and Burset et al. (2001) Nucleic Acids Res. 29:255-259, each of which is herein incorporated by reference in its entirety for all purposes.

[0688] The unidirectional constructs can be circular or linear. For example, a unidirectional construct can be linear.

[0689] The unidirectional constructs disclosed herein can be DNA or RNA, single-stranded, double-stranded, or partially single-stranded and partially double-stranded. For example, the constructs can be single- or double-stranded DNA. In some embodiments, the nucleic acid can be modified (e.g., using nucleoside analogs), as described herein. In a specific example, the unidirectional construct is single-stranded (e.g., single-stranded DNA).

[0690] The unidirectional constructs disclosed herein can be modified on either or both ends to include one or more suitable structural features as needed and/or to confer one or more functional benefit. For example, structural modifications can vary depending on the method(s) used to deliver the constructs disclosed herein to a host cell (e.g., use of viral vector delivery or packaging into lipid nanoparticles for delivery). Such modifications include, for example, terminal structures such as inverted terminal repeats (ITR), hairpin, loops, and other structures such as toroids. For example, the constructs disclosed herein can comprise one, two, or three ITRs or can comprise no more than two ITRs. Various methods of structural modifications are known.

[0691] Similarly, one or both ends of the construct can be protected (e.g., from exonucleolytic degradation) by known methods. For example, one or more dideoxynucleotide residues can be added to the 3′ terminus of a linear molecule and/or self-complementary oligonucleotides can be ligated to one or both ends. See, e.g., Chang et al. (1987) Proc. Natl. Acad. Sci. U.S.A. 84:4959-4963 and Nehls et al. (1996) Science 272:886-889, each of which is herein incorporated by reference in its entirety for all purposes. Additional methods for protecting the constructs from degradation include, but are not limited to, addition of terminal amino group(s) and the use of modified internucleotide linkages such as, for example, phosphorothioates, phosphoramidates, and O-methyl ribose or deoxyribose residues.

[0692] As disclosed in more detail herein, the unidirectional constructs disclosed herein can be introduced into a cell as part of a vector having additional sequences such as, for example, replication origins, promoters, and genes encoding antibiotic resistance. The constructs can be introduced as a naked nucleic acid, can be introduced as a nucleic acid complexed with an agent such as a liposome, polymer, or poloxamer, or can be delivered by viral vectors (e.g., adenovirus, AAV, herpesvirus, retrovirus, lentivirus).

[0693] The FIX coding sequences in the unidirectional constructs disclosed herein may include one or more modifications such as codon optimization (e.g., to human codons), depletion of CpG dinucleotides, mutation of cryptic splice sites, addition of one or more glycosylation sites, or any combination thereof. CpG dinucleotides in a construct can limit the therapeutic utility of the construct. First, unmethylated CpG dinucleotides can interact with host toll-like receptor-9 (TLR-9) to stimulate innate, proinflammatory immune responses. Second, once the CpG dinucleotides become methylated, they can result in the suppression of transgene expression coordinated by methyl-CpG binding proteins. Cryptic splice sites are sequences in a pre-messenger RNA that are not normally used as splice sites, but that can be activated, for example, by mutations that either inactivate canonical splice sites or create splice sites where one did not exist before. Accurate splice site selection is critical for successful gene expression, and removal of cryptic splice sites can favor use of the normal or intended splice site.

[0694] In one example, a FIX coding sequence in a unidirectional construct disclosed herein has one or more cryptic splice sites mutated or removed. In another example, a FIX coding sequence in a unidirectional construct disclosed herein has all identified cryptic splice sites mutated or removed. In another example, a FIX coding sequence in a unidirectional construct disclosed herein has one or more CpG dinucleotides removed (i.e., is CpG depleted). In another example, a FIX coding sequence in a unidirectional construct disclosed herein has all but one CpG dinucleotides removed. In another example, a FIX coding sequence in a unidirectional construct disclosed herein has all CpG dinucleotides removed (i.e., is fully CpG depleted). In another example, a FIX coding sequence in a unidirectional construct disclosed herein is codon optimized (e.g., codon optimized for expression in a human or mammal). In a specific example, a FIX coding sequence in a unidirectional construct disclosed herein has one or more CpG dinucleotides removed (i.e., is CpG depleted) and has one or more cryptic splice sites mutated or removed. In another specific example, a FIX coding sequence in a unidirectional construct disclosed herein has all but one CpG dinucleotides removed and has one or more or all identified cryptic splice sites mutated or removed. In another specific example, a FIX coding sequence in a unidirectional construct disclosed herein has one or more CpG dinucleotides removed (i.e., is CpG depleted) and is codon optimized (e.g., codon optimized for expression in a human or mammal). In another specific example, a FIX coding sequence in a unidirectional construct disclosed herein has all CpG dinucleotides removed (i.e., is fully CpG depleted) and is codon optimized (e.g., codon optimized for expression in a human or mammal).

[0695] In an exemplary unidirectional construct, the construct comprises a polyadenylation signal sequence located 3′ of the FIX coding sequence, the construct comprises a splice acceptor site located 5′ of the FIX coding sequence, and the nucleic acid construct does not comprise a promoter that drives expression of the FIX protein, and optionally the nucleic acid construct does not comprise a homology arm.

[0696] In one example of a unidirectional construct, the FIX protein coding sequence is CpG-depleted (e.g., fully CpG-depleted) and/or codon optimized (e.g., CpG-depleted and codon optimized or fully CpG-depleted and codon optimized). In one example, the FIX coding sequence is (or comprises a sequence) at least 90%, at least 91%, at least 92%, at least 93%, at least 94%, at least 95%, at least 96%, at least 97%, at least 98%, at least 99%, at least 99.5%, or 100% identical to any one of SEQ ID NOS: 64-73. See, e.g., WO 2023/077012 and US 2023-0149563, each of which is herein incorporated by reference in its entirety for all purposes. In another example, the FIX coding sequence is (or comprises a sequence) at least 95%, at least 96%, at least 97%, at least 98%, at least 99%, at least 99.5%, or 100% identical to any one of SEQ ID NOS: 64-73. In another example, the FIX coding sequence is (or comprises a sequence) at least 99%, at least 99.5%, or 100% identical to any one of SEQ ID NOS: 64-73. In another example, the FIX coding sequence comprises the sequence set forth in any one of SEQ ID NOS: 64-73. In another example, the FIX coding sequence consists essentially of the sequence set forth in any one of SEQ ID NOS: 64-73. In another example, the FIX coding sequence consists of the sequence set forth in any one of SEQ ID NOS: 64-73. Optionally, the FIX coding sequence encodes a FIX protein (or a FIX protein comprising a sequence) at least 90%, at least 91%, at least 92%, at least 93%, at least 94%, at least 95%, at least 96%, at least 97%, at least 98%, at least 99%, at least 99.5%, or 100% identical to SEQ ID NO: 97 (and, e.g., retaining the activity of native FIX). Optionally, the FIX coding sequence encodes a FIX protein (or a FIX protein comprising a sequence) at least 95%, at least 96%, at least 97%, at least 98%, at least 99%, at least 99.5%, or 100% identical to SEQ ID NO: 97 (and, e.g., retaining the activity of native FIX). Optionally, the FIX coding sequence in the above examples encodes a FIX protein (or a FIX protein comprising a sequence) at least 99%, at least 99.5%, or 100% identical to SEQ ID NO: 97 (and, e.g., retaining the activity of native FIX). Optionally, the FIX coding sequence in the above examples encodes a FIX protein comprising the sequence set forth in SEQ ID NO: 97. Optionally, the FIX coding sequence in the above examples encodes a FIX protein consisting essentially of the sequence set forth in SEQ ID NO: 97. Optionally, the FIX coding sequence in the above examples encodes a FIX protein consisting of the sequence set forth in SEQ ID NO: 97.

[0697] In one example, the FIX coding sequence is (or comprises a sequence) at least 90%, at least 91%, at least 92%, at least 93%, at least 94%, at least 95%, at least 96%, at least 97%, at least 98%, at least 99%, at least 99.5%, or 100% identical to any one of SEQ ID NOS: 66-73. In another example, the FIX coding sequence is (or comprises a sequence) at least 95%, at least 96%, at least 97%, at least 98%, at least 99%, at least 99.5%, or 100% identical to any one of SEQ ID NOS: 66-73. In another example, the FIX coding sequence is (or comprises a sequence) at least 99%, at least 99.5%, or 100% identical to any one of SEQ ID NOS: 66-73. In another example, the FIX coding sequence comprises the sequence set forth in any one of SEQ ID NOS: 66-73. In another example, the FIX coding sequence consists essentially of the sequence set forth in any one of SEQ ID NOS: 66-73. In another example, the FIX coding sequence consists of the sequence set forth in any one of SEQ ID NOS: 66-73. The FIX coding sequence can be, for example, CpG-depleted (e.g., fully CpG-depleted) and/or codon optimized. For example, the FIX coding sequence can be CpG depleted (e.g., fully CpG-depleted) and codon optimized. Optionally, the FIX coding sequence encodes a FIX protein (or a FIX protein comprising a sequence) at least 90%, at least 91%, at least 92%, at least 93%, at least 94%, at least 95%, at least 96%, at least 97%, at least 98%, at least 99%, at least 99.5%, or 100% identical to SEQ ID NO: 97 (and, e.g., retaining the activity of native FIX). Optionally, the FIX coding sequence encodes a FIX protein (or a FIX protein comprising a sequence) at least 95%, at least 96%, at least 97%, at least 98%, at least 99%, at least 99.5%, or 100% identical to SEQ ID NO: 97 (and, e.g., retaining the activity of native FIX). Optionally, the FIX coding sequence in the above examples encodes a FIX protein at least 99%, at least 99.5%, or 100% identical to SEQ ID NO: 97 (and, e.g., retaining the activity of native FIX). Optionally, the FIX coding sequence in the above examples encodes a FIX protein (or a FIX protein comprising a sequence) comprising the sequence set forth in SEQ ID NO: 97. Optionally, the FIX coding sequence in the above examples encodes a FIX protein consisting essentially of the sequence set forth in SEQ ID NO: 97. Optionally, the FIX coding sequence in the above examples encodes a FIX protein consisting of the sequence set forth in SEQ ID NO: 97.

[0698] In one example, the FIX coding sequence is (or comprises a sequence) at least 90%, at least 91%, at least 92%, at least 93%, at least 94%, at least 95%, at least 96%, at least 97%, at least 98%, at least 99%, at least 99.5%, or 100% identical to SEQ ID NO: 68 or 67. In another example, the FIX coding sequence is (or comprises a sequence) at least 95%, at least 96%, at least 97%, at least 98%, at least 99%, at least 99.5%, or 100% identical to SEQ ID NO: 68 or 67. In another example, the FIX coding sequence is (or comprises a sequence) at least 99%, at least 99.5%, or 100% identical to SEQ ID NO: 68 or 67. In another example, the FIX coding sequence comprises the sequence set forth in SEQ ID NO: 68 or 67. In another example, the FIX coding sequence consists essentially of the sequence set forth in SEQ ID NO: 68 or 67. In another example, the FIX coding sequence consists of the sequence set forth in SEQ ID NO: 68 or 67. The FIX coding sequence can be, for example, CpG-depleted (e.g., fully CpG-depleted) and/or codon optimized. For example, the FIX coding sequence can be CpG depleted (e.g., fully CpG-depleted) and codon optimized. Optionally, the FIX coding sequence encodes a FIX protein (or a FIX protein comprising a sequence) at least 90%, at least 91%, at least 92%, at least 93%, at least 94%, at least 95%, at least 96%, at least 97%, at least 98%, at least 99%, at least 99.5%, or 100% identical to SEQ ID NO: 97 (and, e.g., retaining the activity of native FIX). Optionally, the FIX coding sequence encodes a FIX protein (or a FIX protein comprising a sequence) at least 95%, at least 96%, at least 97%, at least 98%, at least 99%, at least 99.5%, or 100% identical to SEQ ID NO: 97 (and, e.g., retaining the activity of native FIX). Optionally, the FIX coding sequence in the above examples encodes a FIX protein (or a FIX protein comprising a sequence) at least 99%, at least 99.5%, or 100% identical to SEQ ID NO: 97 (and, e.g., retaining the activity of native FIX). Optionally, the FIX coding sequence in the above examples encodes a FIX protein comprising the sequence set forth in SEQ ID NO: 97. Optionally, the FIX coding sequence in the above examples encodes a FIX protein consisting essentially of the sequence set forth in SEQ ID NO: 97. Optionally, the FIX coding sequence in the above examples encodes a FIX protein consisting of the sequence set forth in SEQ ID NO: 97.

[0699] In one example, the FIX coding sequence is (or comprises a sequence) at least 90%, at least 91%, at least 92%, at least 93%, at least 94%, at least 95%, at least 96%, at least 97%, at least 98%, at least 99%, at least 99.5%, or 100% identical to SEQ ID NO: 68. In another example, the FIX coding sequence is (or comprises a sequence) at least 90%, at least 91%, at least 92%, at least 93%, at least 94%, at least 95%, at least 96%, at least 97%, at least 98%, at least 99%, at least 99.5%, or 100% identical to SEQ ID NO: 68 and encodes a FIX protein (or a FIX protein comprising a sequence) at least 99%, at least 99.5%, or 100% identical to SEQ ID NO: 97. In another example, the FIX coding sequence is (or comprises a sequence) at least 90%, at least 91%, at least 92%, at least 93%, at least 94%, at least 95%, at least 96%, at least 97%, at least 98%, at least 99%, at least 99.5%, or 100% identical to SEQ ID NO: 68 and encodes a FIX protein comprising the sequence set forth in SEQ ID NO: 97. In another example, the FIX coding sequence is (or comprises a sequence) at least 95%, at least 96%, at least 97%, at least 98%, at least 99%, at least 99.5%, or 100% identical to SEQ ID NO: 68. In another example, the FIX coding sequence is (or comprises a sequence) at least 95%, at least 96%, at least 97%, at least 98%, at least 99%, at least 99.5%, or 100% identical to SEQ ID NO: 68 and encodes a FIX protein (or a FIX protein comprising a sequence) at least 99%, at least 99.5%, or 100% identical to SEQ ID NO: 97. In another example, the FIX coding sequence is (or comprises a sequence) at least 95%, at least 96%, at least 97%, at least 98%, at least 99%, at least 99.5%, or 100% identical to SEQ ID NO: 68 and encodes a FIX protein comprising the sequence set forth in SEQ ID NO: 97. In another example, the FIX coding sequence is (or comprises a sequence) at least 99%, at least 99.5%, or 100% identical to SEQ ID NO: 68. In another example, the FIX coding sequence is (or comprises a sequence) at least 99%, at least 99.5%, or 100% identical to SEQ ID NO: 68 and encodes a FIX protein (or a FIX protein comprising a sequence) at least 99%, at least 99.5%, or 100% identical to SEQ ID NO: 97. In another example, the FIX coding sequence is (or comprises a sequence) at least 99%, at least 99.5%, or 100% identical to SEQ ID NO: 68 and encodes a FIX protein comprising the sequence set forth in SEQ ID NO: 97. In another example, the FIX coding sequence comprises the sequence set forth in SEQ ID NO: 68. In another example, the FIX coding sequence consists essentially of the sequence set forth in SEQ ID NO: 68. In another example, the FIX coding sequence consists of the sequence set forth in SEQ ID NO: 68. The FIX coding sequence can be, for example, CpG-depleted (e.g., fully CpG-depleted) and/or codon optimized. For example, the FIX coding sequence can be CpG depleted (e.g., fully CpG-depleted) and codon optimized. Optionally, the FIX coding sequence encodes a FIX protein (or a FIX protein comprising a sequence) at least 90%, at least 91%, at least 92%, at least 93%, at least 94%, at least 95%, at least 96%, at least 97%, at least 98%, at least 99%, at least 99.5%, or 100% identical to SEQ ID NO: 97 (and, e.g., retaining the activity of native FIX). Optionally, the FIX coding sequence encodes a FIX protein (or a FIX protein comprising a sequence) at least 95%, at least 96%, at least 97%, at least 98%, at least 99%, at least 99.5%, or 100% identical to SEQ ID NO: 97 (and, e.g., retaining the activity of native FIX). Optionally, the FIX coding sequence in the above examples encodes a FIX protein (or a FIX protein comprising a sequence) at least 99%, at least 99.5%, or 100% identical to SEQ ID NO: 97 (and, e.g., retaining the activity of native FIX). Optionally, the FIX coding sequence in the above examples encodes a FIX protein comprising the sequence set forth in SEQ ID NO: 97. Optionally, the FIX coding sequence in the above examples encodes a FIX protein consisting essentially of the sequence set forth in SEQ ID NO: 97. Optionally, the FIX coding sequence in the above examples encodes a FIX protein consisting of the sequence set forth in SEQ ID NO: 97.

[0700] Various optimized native FIX coding sequences are also provided. In one example, the FIX coding sequence is (or comprises a sequence) at least 90%, at least 91%, at least 92%, at least 93%, at least 94%, at least 95%, at least 96%, at least 97%, at least 98%, at least 99%, at least 99.5%, or 100% identical to any one of SEQ ID NOS: 61-63. In another example, the FIX coding sequence is (or comprises a sequence) at least 95%, at least 96%, at least 97%, at least 98%, at least 99%, at least 99.5%, or 100% identical to any one of SEQ ID NOS: 61-63. In another example, the FIX coding sequence is (or comprises a sequence) at least 99%, at least 99.5%, or 100% identical to any one of SEQ ID NOS: 61-63. In another example, the FIX coding sequence comprises the sequence set forth in any one of SEQ ID NOS: 61-63. In another example, the FIX coding sequence consists essentially of the sequence set forth in any one of SEQ ID NOS: 61-63. In another example, the FIX coding sequence consists of the sequence set forth in any one of SEQ ID NOS: 61-63. The FIX coding sequence can be, for example, CpG-depleted (e.g., all but one CpG dinucleotides removed or fully CpG-depleted) and/or modified to mutate one or more cryptic splice donor sequences (e.g., all identified cryptic splice donor sequences). For example, the FIX coding sequence can be CpG depleted (e.g., all but one CpG dinucleotides removed or fully CpG-depleted) and modified to mutate one or more cryptic splice donor sequences (e.g., all identified cryptic splice donor sequences). Optionally, the FIX coding sequence encodes a FIX protein (or a FIX protein comprising a sequence) at least 90%, at least 91%, at least 92%, at least 93%, at least 94%, at least 95%, at least 96%, at least 97%, at least 98%, at least 99%, at least 99.5%, or 100% identical to SEQ ID NO: 97 (and, e.g., retaining the activity of native FIX). Optionally, the FIX coding sequence encodes a FIX protein (or a FIX protein comprising a sequence) at least 95%, at least 96%, at least 97%, at least 98%, at least 99%, at least 99.5%, or 100% identical to SEQ ID NO: 97 (and, e.g., retaining the activity of native FIX). Optionally, the FIX coding sequence in the above examples encodes a FIX protein (or a FIX protein comprising a sequence) at least 99%, at least 99.5%, or 100% identical to SEQ ID NO: 97 (and, e.g., retaining the activity of native FIX). Optionally, the FIX coding sequence in the above examples encodes a FIX protein comprising the sequence set forth in SEQ ID NO: 97. Optionally, the FIX coding sequence in the above examples encodes a FIX protein consisting essentially of the sequence set forth in SEQ ID NO: 97. Optionally, the FIX coding sequence in the above examples encodes a FIX protein consisting of the sequence set forth in SEQ ID NO: 97.

[0701] In one example, the FIX coding sequence is (or comprises a sequence) at least 90%, at least 91%, at least 92%, at least 93%, at least 94%, at least 95%, at least 96%, at least 97%, at least 98%, at least 99%, at least 99.5%, or 100% identical to SEQ ID NO: 61. In another example, the FIX coding sequence is (or comprises a sequence) at least 90%, at least 91%, at least 92%, at least 93%, at least 94%, at least 95%, at least 96%, at least 97%, at least 98%, at least 99%, at least 99.5%, or 100% identical to SEQ ID NO: 61 and encodes a FIX protein (or a FIX protein comprising a sequence) at least 99%, at least 99.5%, or 100% identical to SEQ ID NO: 97. In another example, the FIX coding sequence is (or comprises a sequence) at least 90%, at least 91%, at least 92%, at least 93%, at least 94%, at least 95%, at least 96%, at least 97%, at least 98%, at least 99%, at least 99.5%, or 100% identical to SEQ ID NO: 61 and encodes a FIX protein comprising the sequence set forth in SEQ ID NO: 97. In another example, the FIX coding sequence is (or comprises a sequence) at least 95%, at least 96%, at least 97%, at least 98%, at least 99%, at least 99.5%, or 100% identical to SEQ ID NO: 61. In another example, the FIX coding sequence is (or comprises a sequence) at least 95%, at least 96%, at least 97%, at least 98%, at least 99%, at least 99.5%, or 100% identical to SEQ ID NO: 61 and encodes a FIX protein (or a FIX protein comprising a sequence) at least 99%, at least 99.5%, or 100% identical to SEQ ID NO: 97. In another example, the FIX coding sequence is (or comprises a sequence) at least 95%, at least 96%, at least 97%, at least 98%, at least 99%, at least 99.5%, or 100% identical to SEQ ID NO: 61 and encodes a FIX protein comprising the sequence set forth in SEQ ID NO: 97. In another example, the FIX coding sequence is (or comprises a sequence) at least 99%, at least 99.5%, or 100% identical to SEQ ID NO: 61. In another example, the FIX coding sequence is (or comprises a sequence) at least 99%, at least 99.5%, or 100% identical to SEQ ID NO: 61 and encodes a FIX protein (or a FIX protein comprising a sequence) at least 99%, at least 99.5%, or 100% identical to SEQ ID NO: 97. In another example, the FIX coding sequence is (or comprises a sequence) at least 99%, at least 99.5%, or 100% identical to SEQ ID NO: 61 and encodes a FIX protein comprising the sequence set forth in SEQ ID NO: 97. In another example, the FIX coding sequence comprises the sequence set forth in SEQ ID NO: 61. In another example, the FIX coding sequence consists essentially of the sequence set forth in SEQ ID NO: 61. In another example, the one of the FIX coding sequences consists of the sequence set forth in SEQ ID NO: 61. The FIX coding sequence can be, for example, CpG-depleted (e.g., all but one CpG dinucleotides removed or fully CpG-depleted) and/or modified to mutate one or more cryptic splice donor sequences (e.g., all identified cryptic splice donor sequences). For example, the FIX coding sequence can be CpG depleted (e.g., all but one CpG dinucleotides removed or fully CpG-depleted) and modified to mutate one or more cryptic splice donor sequences (e.g., all identified cryptic splice donor sequences). Optionally, the FIX coding sequence encodes a FIX protein (or a FIX protein comprising a sequence) at least 90%, at least 91%, at least 92%, at least 93%, at least 94%, at least 95%, at least 96%, at least 97%, at least 98%, at least 99%, at least 99.5%, or 100% identical to SEQ ID NO: 97 (and, e.g., retaining the activity of native FIX). Optionally, the FIX coding sequence encodes a FIX protein (or a FIX protein comprising a sequence) at least 95%, at least 96%, at least 97%, at least 98%, at least 99%, at least 99.5%, or 100% identical to SEQ ID NO: 97 (and, e.g., retaining the activity of native FIX). Optionally, the FIX coding sequence in the above examples encodes a FIX protein (or a FIX protein comprising a sequence) at least 99%, at least 99.5%, or 100% identical to SEQ ID NO: 97 (and, e.g., retaining the activity of native FIX). Optionally, the FIX coding sequence in the above examples encodes a FIX protein comprising the sequence set forth in SEQ ID NO: 97. Optionally, the FIX coding sequence in the above examples encodes a FIX protein consisting essentially of the sequence set forth in SEQ ID NO: 97. Optionally, the FIX coding sequence in the above examples encodes a FIX protein consisting of the sequence set forth in SEQ ID NO: 97.

### (8) Multidomain Therapeutic Protein Nucleic Acid Constructs

[0702] The multidomain therapeutic protein nucleic acid constructs disclosed herein can be unidirectional constructs or bidirectional constructs. Examples of such constructs are provided in PCT/US2023/061858 and U.S. Ser. No. 18/163,698, each of which is herein incorporated by reference in its entirety for all purposes. When specific construct sequences are disclosed herein, they are meant to encompass the sequence disclosed or the reverse complement of the sequence. For example, if a construct disclosed herein consists of the hypothetical sequence 5′-CTGGACCGA-3′, it is also meant to encompass the reverse complement of that sequence (5′-TCGGTCCAG-3′). Likewise, when construct elements are disclosed herein in a specific 5′ to 3′ order, they are also meant to encompass the reverse complement of the order of those elements. One reason for this is that, in many embodiments disclosed herein, the constructs are part of a single-stranded recombinant AAV vector. Single-stranded AAV genomes are packaged as either sense (plus-stranded) or anti-sense (minus-stranded genomes), and single-stranded AAV genomes of + and − polarity are packaged with equal frequency into mature rAAV virions. See, e.g., LING et al. (2015) J. Mol. Genet. Med. 9(3):175, Zhou et al. (2008) Mol. Ther. 16(3):494-499, and Samulski et al. (1987) J. Virol. 61:3096-3101, each of which is herein incorporated by reference in its entirety for all purposes.

[0703] In the nucleic acid constructs, the multidomain therapeutic protein coding sequence, the CD63-binding delivery domain coding sequence, and/or the GAA coding sequence can be codon-optimized for expression in a host cell. For example, the multidomain therapeutic protein coding sequence, the CD63-binding delivery domain coding sequence, and/or the GAA coding sequence can be codon optimized or may use one or more alternative codons for one or more amino acids of the protein (i.e., same amino acid sequence). An alternative codon as used herein refers to variations in codon usage for a given amino acid, and may or may not be a preferred or optimized codon (codon optimized) for a given expression system. Preferred codon usage, or codons that are well-tolerated in a given system of expression, are known.

[0704] In the nucleic acid constructs, the multidomain therapeutic protein coding sequence, the TfR-binding delivery domain coding sequence, and/or the GAA coding sequence can be codon-optimized for expression in a host cell. For example, the multidomain therapeutic protein coding sequence, the TfR-binding delivery domain coding sequence, and/or the GAA coding sequence can be codon optimized or may use one or more alternative codons for one or more amino acids of the protein (i.e., same amino acid sequence). An alternative codon as used herein refers to variations in codon usage for a given amino acid, and may or may not be a preferred or optimized codon (codon optimized) for a given expression system. Preferred codon usage, or codons that are well-tolerated in a given system of expression, are known.

[0705] The nucleic acid constructs disclosed herein can be modified to include any suitable structural feature as needed for any particular use and/or that confers one or more desired functions. For example, the nucleic acid constructs disclosed herein need not comprise a homology arm and/or can be, for example, homology-independent donor constructs.

[0706] In some cases, the nucleic acid construct does not comprise a promoter that drives the expression of the multidomain therapeutic protein. For example, the expression of the multidomain therapeutic protein can be driven by a promoter of the host cell (e.g., the endogenous ALB promoter when the transgene is integrated into a host cell's ALB locus). In other cases, the nucleic acid construct can comprise one or more promoters operably linked to the multidomain therapeutic protein coding sequence. That is, although not required for expression, the constructs disclosed herein may also include transcriptional or translational regulatory sequences such as promoters, enhancers, insulators, internal ribosome entry sites, additional sequences encoding peptides, and/or polyadenylation signals. Some nucleic acid constructs can comprise a promoter that drives expression of the multidomain therapeutic protein. For example, the promoter may be a liver-specific promoter. Examples of liver-specific promoters include TTR promoters, such as human or mouse TTR promoters. In one example, the construct may comprise a TTR promoter, such as a mouse TTR promoter or a human TTR promoter (e.g., the coding sequence for the multidomain therapeutic protein is operably linked to the TTR promoter). In one example, the construct may comprise a SERPINA1 enhancer, such as a mouse SERPINA1 enhancer or a human SERPINA1 enhancer (e.g., the coding sequence for the multidomain therapeutic protein is operably linked to the SERPINA1 enhancer). In one example, the construct may comprise a TTR promoter and a SERPINA1 enhancer, such as a human SERPINA1 enhancer and a mouse TTR promoter (e.g., the coding sequence for the multidomain therapeutic protein is operably linked to the SERPINA1 enhancer and the TTR promoter).

[0707] The nucleic acid constructs can, in some cases, comprise one or more polyadenylation tail sequences or polyadenylation signal sequences. Some nucleic acid constructs can comprise a polyadenylation signal sequence located 3′ of the multidomain therapeutic protein coding sequence. In a specific example, the polyadenylation signal is a simian virus 40 (SV40) late polyadenylation signal (or a variant thereof). In another specific example, the polyadenylation signal is a bovine growth hormone (BGH) polyadenylation signal (or a variant thereof). In another specific example, the polyadenylation signal is a CpG-depleted BGH polyadenylation signal. For example, the polyadenylation signal can be an SV40 polyadenylation signal or a CpG-depleted BGH polyadenylation signal. For example, the polyadenylation signal can comprise, consist essentially of, or consist of SEQ ID NO: 827, 292, or 284. In a specific example, the polyadenylation signal can comprise, consist essentially of, or consist of SEQ ID NO: 827. In a specific example, the polyadenylation signal can comprise, consist essentially of, or consist of SEQ ID NO: 292. In another specific example, the polyadenylation signal can comprise, consist essentially of, or consist of SEQ ID NO: 284. In another specific example, the polyadenylation signal can comprise, consist essentially of, or consist of SEQ ID NO: 285.

[0708] In one example, the polyadenylation signal can comprise a BGH polyadenylation signal. For example, the BGH polyadenylation signal can comprise, consist essentially of, or consist of SEQ ID NO: 858. In another example, the polyadenylation signal can comprise an SV40 polyadenylation signal. For example, the SV40 polyadenylation signal can be a unidirectional SV40 late polyadenylation signal. For example, the transcription terminator sequences that are present in the “early” inverse orientation of SV40 can be mutated (e.g., by mutating the reverse strand AAUAAA sequences to AAUCAA). The SV40 polyA is bidirectional, but the polyadenylation in the “late” orientation is more efficient than the polyadenylation in the “early” orientation. For example, the unidirectional SV40 late polyadenylation signal can comprise, consist essentially of, or consist of SEQ ID NO: 859. In another example, a synthetic polyadenylation signal can be used. For example, the synthetic polyadenylation signal can comprise, consist essentially of, or consist of SEQ ID NO: 860. In another example, two or more polyadenylation signals can be used in combination. For example, the polyadenylation signal can comprise a combination of a BGH polyadenylation signal and an SV40 polyadenylation signal (e.g., an SV40 late polyadenylation signal, such as a unidirectional SV40 late polyadenylation signal). For example, the polyadenylation signal can comprise a combination of a BGH polyadenylation signal and a unidirectional SV40 late polyadenylation signal. For example, the BGH polyadenylation signal can comprise, consist essentially of, or consist of SEQ ID NO: 858, and the unidirectional SV40 late polyadenylation signal can comprise, consist essentially of, or consist of SEQ ID NO: 859. In a specific example, the BGH polyadenylation signal can be upstream (5′) of the SV40 polyadenylation signal (e.g., unidirectional SV40 late polyadenylation signal). For example, the combined polyadenylation signal can comprise the sequence set forth in SEQ ID NO: 902. In another example, the polyadenylation signal can comprise a combination of a BGH polyadenylation signal and a synthetic polyadenylation signal. For example, the BGH polyadenylation signal can comprise, consist essentially of, or consist of SEQ ID NO: 858, and the synthetic polyadenylation signal can comprise, consist essentially of, or consist of SEQ ID NO: 860. In some embodiments, the nucleic acid construct is a unidirectional construct.

[0709] In some embodiments, a stuffer sequence can be used to increase the time between when RNA polymerase transcribes the polyA to the time when it transcribes the next splice acceptor. For example, the stuffer sequence can be used between two different polyadenylation signals (e.g., between a BGH polyadenylation signal and a synthetic polyadenylation signal. For example, the stuffer sequence can comprise, consist essentially of, or consist of SEQ ID NO: 861.

[0710] In some embodiments, MAZ elements that cause polymerase pausing are used in combination with a polyadenylation signal (e.g., a BGH polyadenylation signal or an SV40 polyadenylation signal). For example, one or more (e.g., at least 1, at least 2, at least 3, at least 4, or about 1 to about 4, about 2 to about 4, about 3 to about 4, or 1, 2, 3, or 4) MAZ elements can be used in combination with a polyadenylation signal. For example, the MAZ element can comprise, consist essentially of, or consist of SEQ ID NO: 862.

[0711] In some embodiments, unidirectional SV40 late polyadenylation signals are used. The SV40 polyA is bidirectional, but the polyadenylation in the “late” orientation is more efficient than the polyadenylation in the “early” orientation. The unidirectional SV40 late polyadenylation signals described herein are positioned in the “late” orientation, with the polyadenylation signals present in the “early” orientation mutated or inactivated. In some embodiments, each instance of the sequence AATAAA in the reverse strand is mutated in the unidirectional SV40 late polyadenylation signal. For example, the two conserved AATAAA poly(A) signals present in the SV40 “early” poly(A) to AATCAA. In some embodiments, the unidirectional SV40 late polyadenylation signal is at least 95%, at least 96%, at least 97%, at least 98%, or at least 99% identical to the sequence set forth in SEQ ID NO: 859. In some embodiments, the unidirectional SV40 late polyadenylation signal comprises, consists essentially of, or consists of the sequence set forth in SEQ ID NO: 859.

[0712] The unidirectional SV40 late polyadenylation signals can be used in combination with (e.g., in tandem with) one or more additional polyadenylation signals. Examples of transcription terminators that can be used include, for example, the human growth hormone (HGH) polyadenylation signal, the simian virus 40 (SV40) late polyadenylation signal, the rabbit beta-globin polyadenylation signal, the bovine growth hormone (BGH) polyadenylation signal, the phosphoglycerate kinase (PGK) polyadenylation signal, an AOX1 transcription termination sequence, a CYC1 transcription termination sequence, or any transcription termination sequence known to be suitable for regulating gene expression in eukaryotic cells. For example, the unidirectional SV40 late polyadenylation signals can be used in combination with (e.g., in tandem with) a bovine growth hormone (BGH) polyadenylation signal, optionally wherein the BGH polyadenylation signal is upstream of (5′ of) the unidirectional SV40 late polyadenylation signal. In some embodiments, the BGH polyadenylation signal is at least 95%, at least 96%, at least 97%, at least 98%, or at least 99% identical to the sequence set forth in SEQ ID NO: 858. In some embodiments, the BGH polyadenylation signal comprises, consists essentially of, or consists of the sequence set forth in SEQ ID NO: 858. In some embodiments, the combination of the BGH polyadenylation signal and the unidirectional SV40 late polyadenylation signal is at least 95%, at least 96%, at least 97%, at least 98%, or at least 99% identical to the sequence set forth in SEQ ID NO: 902. In some embodiments, the combination of the BGH polyadenylation signal and the unidirectional SV40 late polyadenylation signal comprises, consists essentially of, or consists of the sequence set forth in SEQ ID NO: 902.

[0713] In some embodiments, a stuffer sequence can be used to increase the time between when RNA polymerase transcribes the polyA to the time when it transcribes the next splice acceptor. For example, the stuffer sequence can be used between two different polyadenylation signals (e.g., between a BGH polyadenylation signal and a synthetic polyadenylation signal. For example, the stuffer sequence can comprise, consist essentially of, or consist of SEQ ID NO: 861.

[0714] In some embodiments, MAZ elements that cause polymerase pausing are used in combination with a polyadenylation signal (e.g., a BGH polyadenylation signal or an SV40 polyadenylation signal). For example, one or more (e.g., at least 1, at least 2, at least 3, at least 4, or about 1 to about 4, about 2 to about 4, about 3 to about 4, or 1, 2, 3, or 4) MAZ elements can be used in combination with a polyadenylation signal. For example, the MAZ element can comprise, consist essentially of, or consist of SEQ ID NO: 862.

[0715] Methods of designing a suitable polyadenylation tail sequence are known. For example, some nucleic acid constructs comprise a polyadenylation tail sequence and/or a polyadenylation signal sequence downstream of an open reading frame (i.e., a polyadenylation tail sequence and/or a polyadenylation signal sequence 3′ of a coding sequence). The polyadenylation tail sequence can be encoded, for example, as a “poly-A” stretch downstream of the multidomain therapeutic protein coding sequence (or other protein coding sequence) in the first and/or second segment. A poly-A tail can comprise, for example, at least 20, 30, 40, 50, 60, 70, 80, 90, or 100 adenines, and optionally up to 300 adenines. In a specific example, the poly-A tail comprises 95, 96, 97, 98, 99, or 100 adenine nucleotides. Methods of designing a suitable polyadenylation tail sequence and/or polyadenylation signal sequence are well known. For example, the polyadenylation signal sequence AAUAAA is commonly used in mammalian systems, although variants such as UAUAAA or AU/GUAAA have been identified. See, e.g., Proudfoot (2011) Genes & Dev. 25(17):1770-82, herein incorporated by reference in its entirety for all purposes.

[0716] The nucleic acid constructs can, in some cases, comprise one or more splice acceptor sites. Some nucleic acid constructs comprise a splice acceptor site located 5′ of the multidomain therapeutic protein coding sequence. In a specific example, the splice acceptor is a mouse Alb exon 2 splice acceptor. In a specific example, the splice acceptor can comprise, consist essentially of, or consist of SEQ ID NO: 286.

[0717] The splice acceptor site can, for example, comprise NAG or consist of NAG. In a specific example, the splice acceptor is an ALB splice acceptor (e.g., an ALB splice acceptor used in the splicing together of exons 1 and 2 of ALB (i.e., ALB exon 2 splice acceptor)). For example, such a splice acceptor can be derived from the human ALB gene. In another example, the splice acceptor can be derived from the mouse Alb gene (e.g., an ALB splice acceptor used in the splicing together of exons 1 and 2 of mouse Alb (i.e., mouse Alb exon 2 splice acceptor)). In another example, the splice acceptor is a GAA splice acceptor. For example, such a splice acceptor can be derived from the human GAA gene. Alternatively, such a splice acceptor can be derived from the mouse GAA gene. Additional suitable splice acceptor sites useful in eukaryotes, including artificial splice acceptors, are known. See, e.g., Shapiro et al. (1987) Nucleic Acids Res. 15:7155-7174 and Burset et al. (2001) Nucleic Acids Res. 29:255-259, each of which is herein incorporated by reference in its entirety for all purposes.

[0718] The nucleic acid constructs can be circular or linear. For example, a nucleic acid construct can be linear. The nucleic acid constructs disclosed herein can be DNA or RNA, single-stranded, double-stranded, or partially single-stranded and partially double-stranded. For example, the constructs can be single- or double-stranded DNA. In some embodiments, the nucleic acid can be modified (e.g., using nucleoside analogs), as described herein. In a specific example, the nucleic acid construct is single-stranded (e.g., single-stranded DNA).

[0719] The nucleic acid constructs disclosed herein can be modified on either or both ends to include one or more suitable structural features as needed and/or to confer one or more functional benefit. For example, structural modifications can vary depending on the method(s) used to deliver the constructs disclosed herein to a host cell (e.g., use of viral vector delivery or packaging into lipid nanoparticles for delivery). Such modifications include, for example, terminal structures such as inverted terminal repeats (ITR), hairpin, loops, and other structures such as toroids. For example, the nucleic acid constructs disclosed herein can comprise one, two, or three ITRs or can comprise no more than two ITRs. Various methods of structural modifications are known.

[0720] Similarly, one or both ends of the nucleic acid construct can be protected (e.g., from exonucleolytic degradation) by known methods. For example, one or more dideoxynucleotide residues can be added to the 3′ terminus of a linear molecule and/or self-complementary oligonucleotides can be ligated to one or both ends. See, e.g., Chang et al. (1987) Proc. Natl. Acad. Sci. U.S.A. 84:4959-4963 and Nehls et al. (1996) Science 272:886-889, each of which is herein incorporated by reference in its entirety for all purposes. Additional methods for protecting the constructs from degradation include, but are not limited to, addition of terminal amino group(s) and the use of modified internucleotide linkages such as, for example, phosphorothioates, phosphoramidates, and O-methyl ribose or deoxyribose residues.

[0721] As disclosed in more detail herein, the nucleic acid constructs disclosed herein can be introduced into a cell as part of a vector having additional sequences such as, for example, replication origins, promoters, and genes encoding antibiotic resistance. The nucleic acid constructs can be introduced as a naked nucleic acid, can be introduced as a nucleic acid complexed with an agent such as a liposome, polymer, or poloxamer, or can be delivered by viral vectors (e.g., adenovirus, AAV, herpesvirus, retrovirus, lentivirus).

[0722] The multidomain therapeutic protein coding sequence, the CD63-binding delivery domain coding sequence, and/or the GAA coding sequence in the nucleic acid constructs disclosed herein may include one or more modifications such as codon optimization (e.g., to human codons), depletion of CpG dinucleotides, mutation of cryptic splice sites, addition of one or more glycosylation sites, or any combination thereof. CpG dinucleotides in a construct can limit the therapeutic utility of the construct. First, unmethylated CpG dinucleotides can interact with host toll-like receptor-9 (TLR-9) to stimulate innate, proinflammatory immune responses. Second, once the CpG dinucleotides become methylated, they can result in the suppression of transgene expression coordinated by methyl-CpG binding proteins. Cryptic splice sites are sequences in a pre-messenger RNA that are not normally used as splice sites, but that can be activated, for example, by mutations that either inactivate canonical splice sites or create splice sites where one did not exist before. Accurate splice site selection is critical for successful gene expression, and removal of cryptic splice sites can favor use of the normal or intended splice site.

[0723] In one example, a multidomain therapeutic protein coding sequence, a CD63-binding delivery domain coding sequence, and/or a GAA coding sequence in a nucleic acid construct disclosed herein has one or more cryptic splice sites mutated or removed. In another example, a multidomain therapeutic protein coding sequence, a CD63-binding delivery domain coding sequence, and/or a GAA coding sequence in a nucleic acid construct disclosed herein has all identified cryptic splice sites mutated or removed. In another example, a multidomain therapeutic protein coding sequence, a CD63-binding delivery domain coding sequence, and/or a GAA coding sequence in a nucleic acid construct disclosed herein has one or more CpG dinucleotides removed (i.e., is CpG depleted). In another example, a multidomain therapeutic protein coding sequence, a CD63-binding delivery domain coding sequence, and/or a GAA coding sequence in a nucleic acid construct disclosed herein has all CpG dinucleotides removed. In another example, a multidomain therapeutic protein coding sequence, a CD63-binding delivery domain coding sequence, and/or a GAA coding sequence in a nucleic acid construct disclosed herein is codon optimized (e.g., codon optimized for expression in a human or mammal). In a specific example, a multidomain therapeutic protein coding sequence, a CD63-binding delivery domain coding sequence, and/or a GAA coding sequence in a nucleic acid construct disclosed herein has one or more CpG dinucleotides removed (i.e., is CpG depleted) and has one or more cryptic splice sites mutated or removed. In another specific example, a multidomain therapeutic protein coding sequence, a CD63-binding delivery domain coding sequence, and/or a GAA coding sequence in a nucleic acid construct disclosed herein has all CpG dinucleotides removed and has one or more or all identified cryptic splice sites mutated or removed. In another specific example, a multidomain therapeutic protein coding sequence, a CD63-binding delivery domain coding sequence, and/or a GAA coding sequence in a nucleic acid construct disclosed herein has one or more CpG dinucleotides removed (i.e., is CpG depleted) and is codon optimized (e.g., codon optimized for expression in a human or mammal). In another specific example, a multidomain therapeutic protein coding sequence, a CD63-binding delivery domain coding sequence, and/or a GAA coding sequence in a nucleic acid construct disclosed herein has all CpG dinucleotides removed (i.e., is fully CpG depleted) and is codon optimized (e.g., codon optimized for expression in a human or mammal).

[0724] The multidomain therapeutic protein coding sequence, the TfR-binding delivery domain coding sequence, and/or the GAA coding sequence in the nucleic acid constructs disclosed herein may include one or more modifications such as codon optimization (e.g., to human codons), depletion of CpG dinucleotides, mutation of cryptic splice sites, addition of one or more glycosylation sites, or any combination thereof. CpG dinucleotides in a construct can limit the therapeutic utility of the construct. First, unmethylated CpG dinucleotides can interact with host toll-like receptor-9 (TLR-9) to stimulate innate, proinflammatory immune responses. Second, once the CpG dinucleotides become methylated, they can result in the suppression of transgene expression coordinated by methyl-CpG binding proteins. Cryptic splice sites are sequences in a pre-messenger RNA that are not normally used as splice sites, but that can be activated, for example, by mutations that either inactivate canonical splice sites or create splice sites where one did not exist before. Accurate splice site selection is critical for successful gene expression, and removal of cryptic splice sites can favor use of the normal or intended splice site.

[0725] In one example, a multidomain therapeutic protein coding sequence, a TfR-binding delivery domain coding sequence, and/or a GAA coding sequence in a nucleic acid construct disclosed herein has one or more cryptic splice sites mutated or removed. In another example, a multidomain therapeutic protein coding sequence, a TfR-binding delivery domain coding sequence, and/or a GAA coding sequence in a nucleic acid construct disclosed herein has all identified cryptic splice sites mutated or removed. In another example, a multidomain therapeutic protein coding sequence, a TfR-binding delivery domain coding sequence, and/or a GAA coding sequence in a nucleic acid construct disclosed herein has one or more CpG dinucleotides removed (i.e., is CpG depleted). In another example, a multidomain therapeutic protein coding sequence, a TfR-binding delivery domain coding sequence, and/or a GAA coding sequence in a nucleic acid construct disclosed herein has all CpG dinucleotides removed. In another example, a multidomain therapeutic protein coding sequence, a TfR-binding delivery domain coding sequence, and/or a GAA coding sequence in a nucleic acid construct disclosed herein is codon optimized (e.g., codon optimized for expression in a human or mammal). In a specific example, a multidomain therapeutic protein coding sequence, a TfR-binding delivery domain coding sequence, and/or a GAA coding sequence in a nucleic acid construct disclosed herein has one or more CpG dinucleotides removed (i.e., is CpG depleted) and has one or more cryptic splice sites mutated or removed. In another specific example, a multidomain therapeutic protein coding sequence, a TfR-binding delivery domain coding sequence, and/or a GAA coding sequence in a nucleic acid construct disclosed herein has all CpG dinucleotides removed and has one or more or all identified cryptic splice sites mutated or removed. In another specific example, a multidomain therapeutic protein coding sequence, a TfR-binding delivery domain coding sequence, and/or a GAA coding sequence in a nucleic acid construct disclosed herein has one or more CpG dinucleotides removed (i.e., is CpG depleted) and is codon optimized (e.g., codon optimized for expression in a human or mammal). In another specific example, a multidomain therapeutic protein coding sequence, a TfR-binding delivery domain coding sequence, and/or a GAA coding sequence in a nucleic acid construct disclosed herein has all CpG dinucleotides removed (i.e., is fully CpG depleted) and is codon optimized (e.g., codon optimized for expression in a human or mammal).

[0726] In an exemplary nucleic acid construct, the construct comprises a polyadenylation signal sequence located 3′ of the multidomain therapeutic protein coding sequence, the construct comprises a splice acceptor site located 5′ of the multidomain therapeutic protein coding sequence, and the nucleic acid construct does not comprise a promoter that drives expression of the multidomain therapeutic protein, and optionally the nucleic acid construct does not comprise a homology arm.

[0727] In a specific example of a multidomain therapeutic protein nucleic acid construct, the encoded multidomain therapeutic protein can comprise SEQ ID NO: 853 or can be at least 90%, at least 91%, at least 92%, at least 93%, at least 94%, at least 95%, at least 96%, at least 97%, at least 98%, at least 99%, or at least 99.5% identical to SEQ ID NO: 853. In another specific example, the multidomain therapeutic protein can consist essentially of SEQ ID NO: 853. In another specific example, the multidomain therapeutic protein can consist of SEQ ID NO: 853.

[0728] Various multidomain therapeutic protein coding sequences are provided. In one example, the multidomain therapeutic protein coding sequence is (or comprises a sequence) at least 90%, at least 91%, at least 92%, at least 93%, at least 94%, at least 95%, at least 96%, at least 97%, at least 98%, at least 99%, at least 99.5%, or 100% identical to SEQ ID NO: 852 or 704. In another example, the multidomain therapeutic protein coding sequence is (or comprises a sequence) at least 95%, at least 96%, at least 97%, at least 98%, at least 99%, at least 99.5%, or 100% identical to SEQ ID NO: 852 or 704. In another example, the multidomain therapeutic protein coding sequence is (or comprises a sequence) at least 99%, at least 99.5%, or 100% identical to SEQ ID NO: 852 or 704. In another example, the multidomain therapeutic protein coding sequence comprises the sequence set forth in SEQ ID NO: 852 or 704. In another example, the multidomain therapeutic protein coding sequence consists essentially of the sequence set forth in SEQ ID NO: 852 or 704. In another example, the multidomain therapeutic protein coding sequence consists of the sequence set forth in SEQ ID NO: 852 or 704. Optionally, the multidomain therapeutic protein coding sequence encodes a multidomain therapeutic protein (or a multidomain therapeutic protein comprising a sequence) at least 90%, at least 91%, at least 92%, at least 93%, at least 94%, at least 95%, at least 96%, at least 97%, at least 98%, at least 99%, at least 99.5%, or 100% identical to SEQ ID NO: 853 (and, e.g., retaining the activity of native GAA). Optionally, the multidomain therapeutic protein coding sequence encodes a multidomain therapeutic protein (or a multidomain therapeutic protein comprising a sequence) at least 95%, at least 96%, at least 97%, at least 98%, at least 99%, at least 99.5%, or 100% identical to SEQ ID NO: 853 (and, e.g., retaining the activity of native GAA). Optionally, the multidomain therapeutic protein coding sequence in the above examples encodes a multidomain therapeutic protein (or a multidomain therapeutic protein comprising a sequence) at least 99%, at least 99.5%, or 100% identical to SEQ ID NO: 853 (and, e.g., retaining the activity of native GAA). Optionally, the multidomain therapeutic protein coding sequence in the above examples encodes a multidomain therapeutic protein comprising the sequence set forth in SEQ ID NO: 853. Optionally, the multidomain therapeutic protein coding sequence in the above examples encodes a multidomain therapeutic protein consisting essentially of the sequence set forth in SEQ ID NO: 853. Optionally, the multidomain therapeutic protein coding sequence in the above examples encodes a multidomain therapeutic protein consisting of the sequence set forth in SEQ ID NO: 853. In some embodiments, the nucleotide at position 1857 is a “G.” In some embodiments, the nucleotide at position 1860 is a “C.” In some embodiments, the nucleotide at position 3105 is a “G.” In some embodiments, the nucleotide at position 1857 is a “G,” the nucleotide at position 1860 is a “C,” and the nucleotide at position 3105 is a “G.”

[0729] Various multidomain therapeutic protein coding sequences are provided. In one example, the multidomain therapeutic protein coding sequence is (or comprises a sequence) at least 90%, at least 91%, at least 92%, at least 93%, at least 94%, at least 95%, at least 96%, at least 97%, at least 98%, at least 99%, at least 99.5%, or 100% identical to SEQ ID NO: 852. In another example, the multidomain therapeutic protein coding sequence is (or comprises a sequence) at least 95%, at least 96%, at least 97%, at least 98%, at least 99%, at least 99.5%, or 100% identical to SEQ ID NO: 852. In another example, the multidomain therapeutic protein coding sequence is (or comprises a sequence) at least 99%, at least 99.5%, or 100% identical to SEQ ID NO: 852. In another example, the multidomain therapeutic protein coding sequence comprises the sequence set forth in SEQ ID NO: 852. In another example, the multidomain therapeutic protein coding sequence consists essentially of the sequence set forth in SEQ ID NO: 852. In another example, the multidomain therapeutic protein coding sequence consists of the sequence set forth in SEQ ID NO: 852. Optionally, the multidomain therapeutic protein coding sequence encodes a multidomain therapeutic protein (or a multidomain therapeutic protein comprising a sequence) at least 90%, at least 91%, at least 92%, at least 93%, at least 94%, at least 95%, at least 96%, at least 97%, at least 98%, at least 99%, at least 99.5%, or 100% identical to SEQ ID NO: 853 (and, e.g., retaining the activity of native GAA). Optionally, the multidomain therapeutic protein coding sequence encodes a multidomain therapeutic protein (or a multidomain therapeutic protein comprising a sequence) at least 95%, at least 96%, at least 97%, at least 98%, at least 99%, at least 99.5%, or 100% identical to SEQ ID NO: 853 (and, e.g., retaining the activity of native GAA). Optionally, the multidomain therapeutic protein coding sequence in the above examples encodes a multidomain therapeutic protein (or a multidomain therapeutic protein comprising a sequence) at least 99%, at least 99.5%, or 100% identical to SEQ ID NO: 853 (and, e.g., retaining the activity of native GAA). Optionally, the multidomain therapeutic protein coding sequence in the above examples encodes a multidomain therapeutic protein comprising the sequence set forth in SEQ ID NO: 853. Optionally, the multidomain therapeutic protein coding sequence in the above examples encodes a multidomain therapeutic protein consisting essentially of the sequence set forth in SEQ ID NO: 853. Optionally, the multidomain therapeutic protein coding sequence in the above examples encodes a multidomain therapeutic protein consisting of the sequence set forth in SEQ ID NO: 853. In some embodiments, the nucleotide at position 1857 is a “G.” In some embodiments, the nucleotide at position 1860 is a “C.” In some embodiments, the nucleotide at position 3105 is a “G.” In some embodiments, the nucleotide at position 1857 is a “G,” the nucleotide at position 1860 is a “C,” and the nucleotide at position 3105 is a “G.”

[0730] The nucleic acid construct can comprise, for example, (1) a 5′ ITR (e.g., such as the one set forth in SEQ ID NO: 283), (2) a splice acceptor site (e.g., a mouse Alb exon 2 splice acceptor, such as the one set forth in SEQ ID NO: 286), (3) the multidomain therapeutic protein coding sequence, (4) a polyadenylation signal (e.g., a BGH polyadenylation signal, such as the one set forth in SEQ ID NO: 858, or a combination of a BGH polyadenylation signal and a unidirectional SV40 late polyadenylation signal, such as the ones set forth in SEQ ID NOS: 858 and 859, respectively), and (5) a 3′ ITR (e.g., such as the one set forth in SEQ ID NO: 283 or the reverse complement thereof). In one example, the nucleic acid construct comprises a sequence at least 90%, at least 91%, at least 92%, at least 93%, at least 94%, at least 95%, at least 96%, at least 97%, at least 98%, at least 99%, at least 99.5%, or 100% identical to SEQ ID NO: 871, 872, 887, or 888. In another example, the nucleic acid construct comprises a sequence at least 90%, at least 91%, at least 92%, at least 93%, at least 94%, at least 95%, at least 96%, at least 97%, at least 98%, at least 99%, at least 99.5%, or 100% identical to SEQ ID NO: 871, 872, 887, or 888 and encodes a multidomain therapeutic protein (or a multidomain therapeutic protein comprising a sequence) at least 99%, at least 99.5%, or 100% identical to SEQ ID NO: 853. In another example, the nucleic acid construct comprises a sequence at least 90%, at least 91%, at least 92%, at least 93%, at least 94%, at least 95%, at least 96%, at least 97%, at least 98%, at least 99%, at least 99.5%, or 100% identical to SEQ ID NO: 871, 872, 887, or 888 and encodes a multidomain therapeutic protein comprising the sequence set forth in SEQ ID NO: 853. In another example, the nucleic acid construct comprises a sequence at least 95%, at least 96%, at least 97%, at least 98%, at least 99%, at least 99.5%, or 100% identical to SEQ ID NO: 871, 872, 887, or 888. In another example, the nucleic acid construct comprises a sequence at least 95%, at least 96%, at least 97%, at least 98%, at least 99%, at least 99.5%, or 100% identical to SEQ ID NO: 871, 872, 887, or 888 and encodes a multidomain therapeutic protein (or a multidomain therapeutic protein comprising a sequence) at least 99%, at least 99.5%, or 100% identical to SEQ ID NO: 853. In another example, the nucleic acid construct comprises a sequence at least 95%, at least 96%, at least 97%, at least 98%, at least 99%, at least 99.5%, or 100% identical to SEQ ID NO: 871, 872, 887, or 888 and encodes a multidomain therapeutic protein comprising the sequence set forth in SEQ ID NO: 853. In another example, the nucleic acid construct comprises a sequence at least 99%, at least 99.5%, or 100% identical to SEQ ID NO: 871, 872, 887, or 888. In another example, the nucleic acid construct comprises a sequence at least 99%, at least 99.5%, or 100% identical to SEQ ID NO: 871, 872, 887, or 888 and encodes a multidomain therapeutic protein (or a multidomain therapeutic protein comprising a sequence) at least 99%, at least 99.5%, or 100% identical to SEQ ID NO: 853. In another example, the nucleic acid construct comprises a sequence at least 99%, at least 99.5%, or 100% identical to SEQ ID NO: 871, 872, 887, or 888 and encodes a multidomain therapeutic protein comprising the sequence set forth in SEQ ID NO: 853. In another example, the nucleic acid construct comprises the sequence set forth in SEQ ID NO: 871, 872, 887, or 888. The multidomain therapeutic protein coding sequence can be, for example, CpG-depleted (e.g., fully CpG-depleted) and/or codon optimized. For example, the multidomain therapeutic protein coding sequence can be CpG depleted (e.g., fully CpG-depleted) and codon optimized. Optionally, the nucleic acid construct encodes a multidomain therapeutic protein (or a multidomain therapeutic protein comprising a sequence) at least 90%, at least 91%, at least 92%, at least 93%, at least 94%, at least 95%, at least 96%, at least 97%, at least 98%, at least 99%, at least 99.5%, or 100% identical to SEQ ID NO: 853 (and, e.g., retaining the activity of native GAA). Optionally, the nucleic acid construct encodes a multidomain therapeutic protein (or a multidomain therapeutic protein comprising a sequence) at least 95%, at least 96%, at least 97%, at least 98%, at least 99%, at least 99.5%, or 100% identical to SEQ ID NO: 853 (and, e.g., retaining the activity of native GAA). Optionally, the nucleic acid construct in the above examples encodes a multidomain therapeutic protein (or a multidomain therapeutic protein comprising a sequence) at least 99%, at least 99.5%, or 100% identical to SEQ ID NO: 853 (and, e.g., retaining the activity of native GAA). Optionally, the nucleic acid construct in the above examples encodes a multidomain therapeutic protein comprising the sequence set forth in SEQ ID NO: 853. Optionally, the nucleic acid construct in the above examples encodes a multidomain therapeutic protein consisting essentially of the sequence set forth in SEQ ID NO: 853. Optionally, the nucleic acid construct in the above examples encodes a multidomain therapeutic protein consisting of the sequence set forth in SEQ ID NO: 853.

[0731] The nucleic acid construct can comprise, for example, (1) a 5′ ITR (e.g., such as the one set forth in SEQ ID NO: 283), (2) a splice acceptor site (e.g., a mouse Alb exon 2 splice acceptor, such as the one set forth in SEQ ID NO: 286), (3) the multidomain therapeutic protein coding sequence, (4) a polyadenylation signal (e.g., a BGH polyadenylation signal, such as the one set forth in SEQ ID NO: 858, or a combination of a BGH polyadenylation signal and a unidirectional SV40 late polyadenylation signal, such as the ones set forth in SEQ ID NOS: 858 and 859, respectively), and (5) a 3′ ITR (e.g., such as the one set forth in SEQ ID NO: 283 or the reverse complement thereof). In one example, the nucleic acid construct comprises a sequence at least 90%, at least 91%, at least 92%, at least 93%, at least 94%, at least 95%, at least 96%, at least 97%, at least 98%, at least 99%, at least 99.5%, or 100% identical to SEQ ID NO: 871 or 887. In another example, the nucleic acid construct comprises a sequence at least 90%, at least 91%, at least 92%, at least 93%, at least 94%, at least 95%, at least 96%, at least 97%, at least 98%, at least 99%, at least 99.5%, or 100% identical to SEQ ID NO: 871 or 887 and encodes a multidomain therapeutic protein (or a multidomain therapeutic protein comprising a sequence) at least 99%, at least 99.5%, or 100% identical to SEQ ID NO: 853. In another example, the nucleic acid construct comprises a sequence at least 90%, at least 91%, at least 92%, at least 93%, at least 94%, at least 95%, at least 96%, at least 97%, at least 98%, at least 99%, at least 99.5%, or 100% identical to SEQ ID NO: 871 or 887 and encodes a multidomain therapeutic protein comprising the sequence set forth in SEQ ID NO: 853. In another example, the nucleic acid construct comprises a sequence at least 95%, at least 96%, at least 97%, at least 98%, at least 99%, at least 99.5%, or 100% identical to SEQ ID NO: 871 or 887. In another example, the nucleic acid construct comprises a sequence at least 95%, at least 96%, at least 97%, at least 98%, at least 99%, at least 99.5%, or 100% identical to SEQ ID NO: 871 or 887 and encodes a multidomain therapeutic protein (or a multidomain therapeutic protein comprising a sequence) at least 99%, at least 99.5%, or 100% identical to SEQ ID NO: 853. In another example, the nucleic acid construct comprises a sequence at least 95%, at least 96%, at least 97%, at least 98%, at least 99%, at least 99.5%, or 100% identical to SEQ ID NO: 871 or 887 and encodes a multidomain therapeutic protein comprising the sequence set forth in SEQ ID NO: 853. In another example, the nucleic acid construct comprises a sequence at least 99%, at least 99.5%, or 100% identical to SEQ ID NO: 871 or 887. In another example, the nucleic acid construct comprises a sequence at least 99%, at least 99.5%, or 100% identical to SEQ ID NO: 871 or 887 and encodes a multidomain therapeutic protein (or a multidomain therapeutic protein comprising a sequence) at least 99%, at least 99.5%, or 100% identical to SEQ ID NO: 853. In another example, the nucleic acid construct comprises a sequence at least 99%, at least 99.5%, or 100% identical to SEQ ID NO: 871 or 887 and encodes a multidomain therapeutic protein comprising the sequence set forth in SEQ ID NO: 853. In another example, the nucleic acid construct comprises the sequence set forth in SEQ ID NO: 871 or 887. The multidomain therapeutic protein coding sequence can be, for example, CpG-depleted (e.g., fully CpG-depleted) and/or codon optimized. For example, the multidomain therapeutic protein coding sequence can be CpG depleted (e.g., fully CpG-depleted) and codon optimized. Optionally, the nucleic acid construct encodes a multidomain therapeutic protein (or a multidomain therapeutic protein comprising a sequence) at least 90%, at least 91%, at least 92%, at least 93%, at least 94%, at least 95%, at least 96%, at least 97%, at least 98%, at least 99%, at least 99.5%, or 100% identical to SEQ ID NO: 853 (and, e.g., retaining the activity of native GAA). Optionally, the nucleic acid construct encodes a multidomain therapeutic protein (or a multidomain therapeutic protein comprising a sequence) at least 95%, at least 96%, at least 97%, at least 98%, at least 99%, at least 99.5%, or 100% identical to SEQ ID NO: 853 (and, e.g., retaining the activity of native GAA). Optionally, the nucleic acid construct in the above examples encodes a multidomain therapeutic protein (or a multidomain therapeutic protein comprising a sequence) at least 99%, at least 99.5%, or 100% identical to SEQ ID NO: 853 (and, e.g., retaining the activity of native GAA). Optionally, the nucleic acid construct in the above examples encodes a multidomain therapeutic protein comprising the sequence set forth in SEQ ID NO: 853. Optionally, the nucleic acid construct in the above examples encodes a multidomain therapeutic protein consisting essentially of the sequence set forth in SEQ ID NO: 853. Optionally, the nucleic acid construct in the above examples encodes a multidomain therapeutic protein consisting of the sequence set forth in SEQ ID NO: 853.

[0732] In a specific example of a multidomain therapeutic protein nucleic acid construct, the encoded multidomain therapeutic protein can comprise SEQ ID NO: 316 or can be at least 90%, at least 91%, at least 92%, at least 93%, at least 94%, at least 95%, at least 96%, at least 97%, at least 98%, at least 99%, or at least 99.5% identical to SEQ ID NO: 316. In another specific example, the multidomain therapeutic protein can consist essentially of SEQ ID NO: 316. In another specific example, the multidomain therapeutic protein can consist of SEQ ID NO: 316.

[0733] Various multidomain therapeutic protein coding sequences are provided. In one example, the multidomain therapeutic protein coding sequence is (or comprises a sequence) at least 90%, at least 91%, at least 92%, at least 93%, at least 94%, at least 95%, at least 96%, at least 97%, at least 98%, at least 99%, at least 99.5%, or 100% identical to any one of SEQ ID NOS: 863, 864, 865, and 319. In another example, the multidomain therapeutic protein coding sequence is (or comprises a sequence) at least 95%, at least 96%, at least 97%, at least 98%, at least 99%, at least 99.5%, or 100% identical to any one of SEQ ID NOS: 863, 864, 865, and 319. In another example, the multidomain therapeutic protein coding sequence is (or comprises a sequence) at least 99%, at least 99.5%, or 100% identical to any one of SEQ ID NOS: 863, 864, 865, and 319. In another example, the multidomain therapeutic protein coding sequence comprises the sequence set forth in any one of SEQ ID NOS: 863, 864, 865, and 319. In another example, the multidomain therapeutic protein coding sequence consists essentially of the sequence set forth in any one of SEQ ID NOS: 863, 864, 865, and 319. In another example, the multidomain therapeutic protein coding sequence consists of the sequence set forth in any one of SEQ ID NOS: 863, 864, 865, and 319. Optionally, the multidomain therapeutic protein coding sequence encodes a multidomain therapeutic protein (or a multidomain therapeutic protein comprising a sequence) at least 90%, at least 91%, at least 92%, at least 93%, at least 94%, at least 95%, at least 96%, at least 97%, at least 98%, at least 99%, at least 99.5%, or 100% identical to SEQ ID NO: 316 (and, e.g., retaining the activity of native GAA). Optionally, the multidomain therapeutic protein coding sequence encodes a multidomain therapeutic protein (or a multidomain therapeutic protein comprising a sequence) at least 95%, at least 96%, at least 97%, at least 98%, at least 99%, at least 99.5%, or 100% identical to SEQ ID NO: 316 (and, e.g., retaining the activity of native GAA). Optionally, the multidomain therapeutic protein coding sequence in the above examples encodes a multidomain therapeutic protein (or a multidomain therapeutic protein comprising a sequence) at least 99%, at least 99.5%, or 100% identical to SEQ ID NO: 316 (and, e.g., retaining the activity of native GAA). Optionally, the multidomain therapeutic protein coding sequence in the above examples encodes a multidomain therapeutic protein comprising the sequence set forth in SEQ ID NO: 316. Optionally, the multidomain therapeutic protein coding sequence in the above examples encodes a multidomain therapeutic protein consisting essentially of the sequence set forth in SEQ ID NO: 316. Optionally, the multidomain therapeutic protein coding sequence in the above examples encodes a multidomain therapeutic protein consisting of the sequence set forth in SEQ ID NO: 316. In some embodiments, the nucleotide at position 3 is an “A.” In some embodiments, the nucleotide at position 132 is an “A.” In some embodiments, the nucleotide at position 273 is a “T.” In some embodiments, the nucleotide at position 723 is a “G.” In some embodiments, the nucleotide at position 1830 is a “G.” In some embodiments, the nucleotide at position 1833 is a “C.” In some embodiments, the nucleotide at position 3078 is a “G.” In some embodiments, the nucleotide at position 3 is an “A,” the nucleotide at position 132 is an “A,” the nucleotide at position 273 is a “T,” the nucleotide at position 723 is a “G,” the nucleotide at position 1830 is a “G,” the nucleotide at position 1833 is a “C,” and the nucleotide at position 3078 is a “G.” In some embodiments, the nucleotide at position 273 is a “T,” the nucleotide at position 723 is a “G,” the nucleotide at position 1830 is a “G,” the nucleotide at position 1833 is a “C,” and the nucleotide at position 3078 is a “G.” In some embodiments, the nucleotide at position 1830 is a “G,” the nucleotide at position 1833 is a “C,” and the nucleotide at position 3078 is a “G.”

[0734] Various multidomain therapeutic protein coding sequences are provided. In one example, the multidomain therapeutic protein coding sequence is (or comprises a sequence) at least 90%, at least 91%, at least 92%, at least 93%, at least 94%, at least 95%, at least 96%, at least 97%, at least 98%, at least 99%, at least 99.5%, or 100% identical to SEQ ID NO: 863. In another example, the multidomain therapeutic protein coding sequence is (or comprises a sequence) at least 95%, at least 96%, at least 97%, at least 98%, at least 99%, at least 99.5%, or 100% identical to SEQ ID NO: 863. In another example, the multidomain therapeutic protein coding sequence is (or comprises a sequence) at least 99%, at least 99.5%, or 100% identical to SEQ ID NO: 863. In another example, the multidomain therapeutic protein coding sequence comprises the sequence set forth in SEQ ID NO: 863. In another example, the multidomain therapeutic protein coding sequence consists essentially of the sequence set forth in SEQ ID NO: 863. In another example, the multidomain therapeutic protein coding sequence consists of the sequence set forth in SEQ ID NO: 863. Optionally, the multidomain therapeutic protein coding sequence encodes a multidomain therapeutic protein (or a multidomain therapeutic protein comprising a sequence) at least 90%, at least 91%, at least 92%, at least 93%, at least 94%, at least 95%, at least 96%, at least 97%, at least 98%, at least 99%, at least 99.5%, or 100% identical to SEQ ID NO: 316 (and, e.g., retaining the activity of native GAA). Optionally, the multidomain therapeutic protein coding sequence encodes a multidomain therapeutic protein (or a multidomain therapeutic protein comprising a sequence) at least 95%, at least 96%, at least 97%, at least 98%, at least 99%, at least 99.5%, or 100% identical to SEQ ID NO: 316 (and, e.g., retaining the activity of native GAA). Optionally, the multidomain therapeutic protein coding sequence in the above examples encodes a multidomain therapeutic protein (or a multidomain therapeutic protein comprising a sequence) at least 99%, at least 99.5%, or 100% identical to SEQ ID NO: 316 (and, e.g., retaining the activity of native GAA). Optionally, the multidomain therapeutic protein coding sequence in the above examples encodes a multidomain therapeutic protein comprising the sequence set forth in SEQ ID NO: 316. Optionally, the multidomain therapeutic protein coding sequence in the above examples encodes a multidomain therapeutic protein consisting essentially of the sequence set forth in SEQ ID NO: 316. Optionally, the multidomain therapeutic protein coding sequence in the above examples encodes a multidomain therapeutic protein consisting of the sequence set forth in SEQ ID NO: 316. In some embodiments, the nucleotide at position 3 is an “A.” In some embodiments, the nucleotide at position 132 is an “A.” In some embodiments, the nucleotide at position 273 is a “T.” In some embodiments, the nucleotide at position 723 is a “G.” In some embodiments, the nucleotide at position 1830 is a “G.” In some embodiments, the nucleotide at position 1833 is a “C.” In some embodiments, the nucleotide at position 3078 is a “G.” In some embodiments, the nucleotide at position 3 is an “A,” the nucleotide at position 132 is an “A,” the nucleotide at position 273 is a “T,” the nucleotide at position 723 is a “G,” the nucleotide at position 1830 is a “G,” the nucleotide at position 1833 is a “C,” and the nucleotide at position 3078 is a “G.” In some embodiments, the nucleotide at position 273 is a “T,” the nucleotide at position 723 is a “G,” the nucleotide at position 1830 is a “G,” the nucleotide at position 1833 is a “C,” and the nucleotide at position 3078 is a “G.” In some embodiments, the nucleotide at position 1830 is a “G,” the nucleotide at position 1833 is a “C,” and the nucleotide at position 3078 is a “G.”

[0735] The nucleic acid construct can comprise, for example, (1) a 5′ ITR (e.g., such as the one set forth in SEQ ID NO: 283), (2) a splice acceptor site (e.g., a mouse Alb exon 2 splice acceptor, such as the one set forth in SEQ ID NO: 286), (3) the multidomain therapeutic protein coding sequence, (4) a polyadenylation signal (e.g., a BGH polyadenylation signal, such as the one set forth in SEQ ID NO: 858, or a combination of a BGH polyadenylation signal and a unidirectional SV40 late polyadenylation signal, such as the ones set forth in SEQ ID NOS: 858 and 859, respectively), and (5) a 3′ ITR (e.g., such as the one set forth in SEQ ID NO: 283 or the reverse complement thereof). In one example, the nucleic acid construct comprises a sequence at least 90%, at least 91%, at least 92%, at least 93%, at least 94%, at least 95%, at least 96%, at least 97%, at least 98%, at least 99%, at least 99.5%, or 100% identical to SEQ ID NO: 884, 885, 900, or 901. In another example, the nucleic acid construct comprises a sequence at least 90%, at least 91%, at least 92%, at least 93%, at least 94%, at least 95%, at least 96%, at least 97%, at least 98%, at least 99%, at least 99.5%, or 100% identical to SEQ ID NO: 884, 885, 900, or 901 and encodes a multidomain therapeutic protein (or a multidomain therapeutic protein comprising a sequence) at least 99%, at least 99.5%, or 100% identical to SEQ ID NO: 316. In another example, the nucleic acid construct comprises a sequence at least 90%, at least 91%, at least 92%, at least 93%, at least 94%, at least 95%, at least 96%, at least 97%, at least 98%, at least 99%, at least 99.5%, or 100% identical to SEQ ID NO: 884, 885, 900, or 901 and encodes a multidomain therapeutic protein comprising the sequence set forth in SEQ ID NO: 316. In another example, the nucleic acid construct comprises a sequence at least 95%, at least 96%, at least 97%, at least 98%, at least 99%, at least 99.5%, or 100% identical to SEQ ID NO: 884, 885, 900, or 901. In another example, the nucleic acid construct comprises a sequence at least 95%, at least 96%, at least 97%, at least 98%, at least 99%, at least 99.5%, or 100% identical to SEQ ID NO: 884, 885, 900, or 901 and encodes a multidomain therapeutic protein (or a multidomain therapeutic protein comprising a sequence) at least 99%, at least 99.5%, or 100% identical to SEQ ID NO: 316. In another example, the nucleic acid construct comprises a sequence at least 95%, at least 96%, at least 97%, at least 98%, at least 99%, at least 99.5%, or 100% identical to SEQ ID NO: 884, 885, 900, or 901 and encodes a multidomain therapeutic protein comprising the sequence set forth in SEQ ID NO: 316. In another example, the nucleic acid construct comprises a sequence at least 99%, at least 99.5%, or 100% identical to SEQ ID NO: 884, 885, 900, or 901. In another example, the nucleic acid construct comprises a sequence at least 99%, at least 99.5%, or 100% identical to SEQ ID NO: 884, 885, 900, or 901 and encodes a multidomain therapeutic protein (or a multidomain therapeutic protein comprising a sequence) at least 99%, at least 99.5%, or 100% identical to SEQ ID NO: 316. In another example, the nucleic acid construct comprises a sequence at least 99%, at least 99.5%, or 100% identical to SEQ ID NO: 884, 885, 900, or 901 and encodes a multidomain therapeutic protein comprising the sequence set forth in SEQ ID NO: 316. In another example, the nucleic acid construct comprises the sequence set forth in SEQ ID NO: 884, 885, 900, or 901. The multidomain therapeutic protein coding sequence can be, for example, CpG-depleted (e.g., fully CpG-depleted) and/or codon optimized. For example, the multidomain therapeutic protein coding sequence can be CpG depleted (e.g., fully CpG-depleted) and codon optimized. Optionally, the nucleic acid construct encodes a multidomain therapeutic protein (or a multidomain therapeutic protein comprising a sequence) at least 90%, at least 91%, at least 92%, at least 93%, at least 94%, at least 95%, at least 96%, at least 97%, at least 98%, at least 99%, at least 99.5%, or 100% identical to SEQ ID NO: 316 (and, e.g., retaining the activity of native GAA). Optionally, the nucleic acid construct encodes a multidomain therapeutic protein (or a multidomain therapeutic protein comprising a sequence) at least 95%, at least 96%, at least 97%, at least 98%, at least 99%, at least 99.5%, or 100% identical to SEQ ID NO: 316 (and, e.g., retaining the activity of native GAA). Optionally, the nucleic acid construct in the above examples encodes a multidomain therapeutic protein (or a multidomain therapeutic protein comprising a sequence) at least 99%, at least 99.5%, or 100% identical to SEQ ID NO: 316 (and, e.g., retaining the activity of native GAA). Optionally, the nucleic acid construct in the above examples encodes a multidomain therapeutic protein comprising the sequence set forth in SEQ ID NO: 316. Optionally, the nucleic acid construct in the above examples encodes a multidomain therapeutic protein consisting essentially of the sequence set forth in SEQ ID NO: 316. Optionally, the nucleic acid construct in the above examples encodes a multidomain therapeutic protein consisting of the sequence set forth in SEQ ID NO: 316.

[0736] The nucleic acid construct can comprise, for example, (1) a 5′ ITR (e.g., such as the one set forth in SEQ ID NO: 283), (2) a splice acceptor site (e.g., a mouse Alb exon 2 splice acceptor, such as the one set forth in SEQ ID NO: 286), (3) the multidomain therapeutic protein coding sequence, (4) a polyadenylation signal (e.g., a BGH polyadenylation signal, such as the one set forth in SEQ ID NO: 858, or a combination of a BGH polyadenylation signal and a unidirectional SV40 late polyadenylation signal, such as the ones set forth in SEQ ID NOS: 858 and 859, respectively), and (5) a 3′ ITR (e.g., such as the one set forth in SEQ ID NO: 283 or the reverse complement thereof). In one example, the nucleic acid construct comprises a sequence at least 90%, at least 91%, at least 92%, at least 93%, at least 94%, at least 95%, at least 96%, at least 97%, at least 98%, at least 99%, at least 99.5%, or 100% identical to SEQ ID NO: 884 or 900. In another example, the nucleic acid construct comprises a sequence at least 90%, at least 91%, at least 92%, at least 93%, at least 94%, at least 95%, at least 96%, at least 97%, at least 98%, at least 99%, at least 99.5%, or 100% identical to SEQ ID NO: 884 or 900 and encodes a multidomain therapeutic protein (or a multidomain therapeutic protein comprising a sequence) at least 99%, at least 99.5%, or 100% identical to SEQ ID NO: 316. In another example, the nucleic acid construct comprises a sequence at least 90%, at least 91%, at least 92%, at least 93%, at least 94%, at least 95%, at least 96%, at least 97%, at least 98%, at least 99%, at least 99.5%, or 100% identical to SEQ ID NO: 884 or 900 and encodes a multidomain therapeutic protein comprising the sequence set forth in SEQ ID NO: 316. In another example, the nucleic acid construct comprises a sequence at least 95%, at least 96%, at least 97%, at least 98%, at least 99%, at least 99.5%, or 100% identical to SEQ ID NO: 884 or 900. In another example, the nucleic acid construct comprises a sequence at least 95%, at least 96%, at least 97%, at least 98%, at least 99%, at least 99.5%, or 100% identical to SEQ ID NO: 884 or 900 and encodes a multidomain therapeutic protein (or a multidomain therapeutic protein comprising a sequence) at least 99%, at least 99.5%, or 100% identical to SEQ ID NO: 316. In another example, the nucleic acid construct comprises a sequence at least 95%, at least 96%, at least 97%, at least 98%, at least 99%, at least 99.5%, or 100% identical to SEQ ID NO: 884 or 900 and encodes a multidomain therapeutic protein comprising the sequence set forth in SEQ ID NO: 316. In another example, the nucleic acid construct comprises a sequence at least 99%, at least 99.5%, or 100% identical to SEQ ID NO: 884 or 900. In another example, the nucleic acid construct comprises a sequence at least 99%, at least 99.5%, or 100% identical to SEQ ID NO: 884 or 900 and encodes a multidomain therapeutic protein (or a multidomain therapeutic protein comprising a sequence) at least 99%, at least 99.5%, or 100% identical to SEQ ID NO: 316. In another example, the nucleic acid construct comprises a sequence at least 99%, at least 99.5%, or 100% identical to SEQ ID NO: 884 or 900 and encodes a multidomain therapeutic protein comprising the sequence set forth in SEQ ID NO: 316. In another example, the nucleic acid construct comprises the sequence set forth in SEQ ID NO: 884 or 900. The multidomain therapeutic protein coding sequence can be, for example, CpG-depleted (e.g., fully CpG-depleted) and/or codon optimized. For example, the multidomain therapeutic protein coding sequence can be CpG depleted (e.g., fully CpG-depleted) and codon optimized. Optionally, the nucleic acid construct encodes a multidomain therapeutic protein (or a multidomain therapeutic protein comprising a sequence) at least 90%, at least 91%, at least 92%, at least 93%, at least 94%, at least 95%, at least 96%, at least 97%, at least 98%, at least 99%, at least 99.5%, or 100% identical to SEQ ID NO: 316 (and, e.g., retaining the activity of native GAA). Optionally, the nucleic acid construct encodes a multidomain therapeutic protein (or a multidomain therapeutic protein comprising a sequence) at least 95%, at least 96%, at least 97%, at least 98%, at least 99%, at least 99.5%, or 100% identical to SEQ ID NO: 316 (and, e.g., retaining the activity of native GAA). Optionally, the nucleic acid construct in the above examples encodes a multidomain therapeutic protein (or a multidomain therapeutic protein comprising a sequence) at least 99%, at least 99.5%, or 100% identical to SEQ ID NO: 316 (and, e.g., retaining the activity of native GAA). Optionally, the nucleic acid construct in the above examples encodes a multidomain therapeutic protein comprising the sequence set forth in SEQ ID NO: 316. Optionally, the nucleic acid construct in the above examples encodes a multidomain therapeutic protein consisting essentially of the sequence set forth in SEQ ID NO: 316. Optionally, the nucleic acid construct in the above examples encodes a multidomain therapeutic protein consisting of the sequence set forth in SEQ ID NO: 316.

[0737] In a specific example of a multidomain therapeutic protein nucleic acid construct, the encoded multidomain therapeutic protein can comprise SEQ ID NO: 316 or can be at least 90%, at least 91%, at least 92%, at least 93%, at least 94%, at least 95%, at least 96%, at least 97%, at least 98%, at least 99%, or at least 99.5% identical to SEQ ID NO: 316. In another specific example, the multidomain therapeutic protein can consist essentially of SEQ ID NO: 316. In another specific example, the multidomain therapeutic protein can consist of SEQ ID NO: 316.

[0738] Various multidomain therapeutic protein coding sequences are provided. In one example, the multidomain therapeutic protein coding sequence is (or comprises a sequence) at least 90%, at least 91%, at least 92%, at least 93%, at least 94%, at least 95%, at least 96%, at least 97%, at least 98%, at least 99%, at least 99.5%, or 100% identical to any one of SEQ ID NOS: 317-325. In another example, the multidomain therapeutic protein coding sequence is (or comprises a sequence) at least 95%, at least 96%, at least 97%, at least 98%, at least 99%, at least 99.5%, or 100% identical to any one of SEQ ID NOS: 317-325. In another example, the multidomain therapeutic protein coding sequence is (or comprises a sequence) at least 99%, at least 99.5%, or 100% identical to any one of SEQ ID NOS: 317-325. In another example, the multidomain therapeutic protein coding sequence comprises the sequence set forth in any one of SEQ ID NOS: 317-325. In another example, the multidomain therapeutic protein coding sequence consists essentially of the sequence set forth in any one of SEQ ID NOS: 317-325. In another example, the multidomain therapeutic protein coding sequence consists of the sequence set forth in any one of SEQ ID NOS: 317-325. In one example, the multidomain therapeutic protein coding sequence is (or comprises a sequence) at least 90%, at least 91%, at least 92%, at least 93%, at least 94%, at least 95%, at least 96%, at least 97%, at least 98%, at least 99%, at least 99.5%, or 100% identical to SEQ ID NO: 319. In another example, the multidomain therapeutic protein coding sequence is (or comprises a sequence) at least 95%, at least 96%, at least 97%, at least 98%, at least 99%, at least 99.5%, or 100% identical to SEQ ID NO: 319. In another example, the multidomain therapeutic protein coding sequence is (or comprises a sequence) at least 99%, at least 99.5%, or 100% identical to SEQ ID NO: 319. In another example, the multidomain therapeutic protein coding sequence comprises the sequence set forth in SEQ ID NO: 319. In another example, the multidomain therapeutic protein coding sequence consists essentially of the sequence set forth in SEQ ID NO: 319. In another example, the multidomain therapeutic protein coding sequence consists of the sequence set forth in SEQ ID NO: 319. Optionally, the multidomain therapeutic protein coding sequence encodes a multidomain therapeutic protein (or a multidomain therapeutic protein comprising a sequence) at least 90%, at least 91%, at least 92%, at least 93%, at least 94%, at least 95%, at least 96%, at least 97%, at least 98%, at least 99%, at least 99.5%, or 100% identical to SEQ ID NO: 316 (and, e.g., retaining the activity of native GAA). Optionally, the multidomain therapeutic protein coding sequence encodes a multidomain therapeutic protein (or a multidomain therapeutic protein comprising a sequence) at least 95%, at least 96%, at least 97%, at least 98%, at least 99%, at least 99.5%, or 100% identical to SEQ ID NO: 316 (and, e.g., retaining the activity of native GAA). Optionally, the multidomain therapeutic protein coding sequence in the above examples encodes a multidomain therapeutic protein (or a multidomain therapeutic protein comprising a sequence) at least 99%, at least 99.5%, or 100% identical to SEQ ID NO: 316 (and, e.g., retaining the activity of native GAA). Optionally, the multidomain therapeutic protein coding sequence in the above examples encodes a multidomain therapeutic protein comprising the sequence set forth in SEQ ID NO: 316. Optionally, the multidomain therapeutic protein coding sequence in the above examples encodes a multidomain therapeutic protein consisting essentially of the sequence set forth in SEQ ID NO: 316. Optionally, the multidomain therapeutic protein coding sequence in the above examples encodes a multidomain therapeutic protein consisting of the sequence set forth in SEQ ID NO: 316.

[0739] Various codon optimized multidomain therapeutic protein coding sequences are provided. The multidomain therapeutic protein coding sequence can be, for example, CpG-depleted (e.g., fully CpG depleted) and/or codon optimized (e.g., CpG depleted (e.g., fully CpG-depleted) and codon optimized). In one example, the multidomain therapeutic protein coding sequence is (or comprises a sequence) at least 90%, at least 91%, at least 92%, at least 93%, at least 94%, at least 95%, at least 96%, at least 97%, at least 98%, at least 99%, at least 99.5%, or 100% identical to any one of SEQ ID NOS: 318-325. In another example, the multidomain therapeutic protein coding sequence is (or comprises a sequence) at least 95%, at least 96%, at least 97%, at least 98%, at least 99%, at least 99.5%, or 100% identical to any one of SEQ ID NOS: 318-325. In another example, the multidomain therapeutic protein coding sequence is (or comprises a sequence) at least 99%, at least 99.5%, or 100% identical to any one of SEQ ID NOS: 318-325. In another example, the multidomain therapeutic protein coding sequence comprises the sequence set forth in any one of SEQ ID NOS: 318-325. In another example, the multidomain therapeutic protein coding sequence consists essentially of the sequence set forth in any one of SEQ ID NOS: 318-325. In another example, the multidomain therapeutic protein coding sequence consists of the sequence set forth in any one of SEQ ID NOS: 318-325. Optionally, the multidomain therapeutic protein coding sequence encodes a multidomain therapeutic protein (or a multidomain therapeutic protein comprising a sequence) at least 90%, at least 91%, at least 92%, at least 93%, at least 94%, at least 95%, at least 96%, at least 97%, at least 98%, at least 99%, at least 99.5%, or 100% identical to SEQ ID NO: 316 (and, e.g., retaining the activity of native GAA). Optionally, the multidomain therapeutic protein coding sequence encodes a multidomain therapeutic protein (or a multidomain therapeutic protein comprising a sequence) at least 95%, at least 96%, at least 97%, at least 98%, at least 99%, at least 99.5%, or 100% identical to SEQ ID NO: 316 (and, e.g., retaining the activity of native GAA). Optionally, the GAA coding sequence in the above examples encodes a multidomain therapeutic protein (or a multidomain therapeutic protein comprising a sequence) at least 99%, at least 99.5%, or 100% identical to SEQ ID NO: 316 (and, e.g., retaining the activity of native GAA). Optionally, the multidomain therapeutic protein coding sequence in the above examples encodes a multidomain therapeutic protein comprising the sequence set forth in SEQ ID NO: 316. Optionally, the multidomain therapeutic protein coding sequence in the above examples encodes a multidomain therapeutic protein consisting essentially of the sequence set forth in SEQ ID NO: 316. Optionally, the multidomain therapeutic protein coding sequence in the above examples encodes a multidomain therapeutic protein consisting of the sequence set forth in SEQ ID NO: 316.

[0740] In one example, the multidomain therapeutic protein coding sequence is (or comprises a sequence) at least 90%, at least 91%, at least 92%, at least 93%, at least 94%, at least 95%, at least 96%, at least 97%, at least 98%, at least 99%, at least 99.5%, or 100% identical to SEQ ID NO: 319. In another example, the multidomain therapeutic protein coding sequence is (or comprises a sequence) at least 90%, at least 91%, at least 92%, at least 93%, at least 94%, at least 95%, at least 96%, at least 97%, at least 98%, at least 99%, at least 99.5%, or 100% identical to SEQ ID NO: 319 and encodes a multidomain therapeutic protein (or a multidomain therapeutic protein comprising a sequence) at least 99%, at least 99.5%, or 100% identical to SEQ ID NO: 316. In another example, the multidomain therapeutic protein coding sequence is (or comprises a sequence) at least 90%, at least 91%, at least 92%, at least 93%, at least 94%, at least 95%, at least 96%, at least 97%, at least 98%, at least 99%, at least 99.5%, or 100% identical to SEQ ID NO: 319 and encodes a multidomain therapeutic protein comprising the sequence set forth in SEQ ID NO: 316. In another example, the multidomain therapeutic protein coding sequence is (or comprises a sequence) at least 95%, at least 96%, at least 97%, at least 98%, at least 99%, at least 99.5%, or 100% identical to SEQ ID NO: 319. In another example, the multidomain therapeutic protein coding sequence is (or comprises a sequence) at least 95%, at least 96%, at least 97%, at least 98%, at least 99%, at least 99.5%, or 100% identical to SEQ ID NO: 319 and encodes a multidomain therapeutic protein (or a multidomain therapeutic protein comprising a sequence) at least 99%, at least 99.5%, or 100% identical to SEQ ID NO: 316. In another example, the multidomain therapeutic protein coding sequence is (or comprises a sequence) at least 95%, at least 96%, at least 97%, at least 98%, at least 99%, at least 99.5%, or 100% identical to SEQ ID NO: 319 and encodes a multidomain therapeutic protein comprising the sequence set forth in SEQ ID NO: 316. In another example, the multidomain therapeutic protein coding sequence is (or comprises a sequence) at least 99%, at least 99.5%, or 100% identical to SEQ ID NO: 319. In another example, the multidomain therapeutic protein coding sequence is (or comprises a sequence) at least 99%, at least 99.5%, or 100% identical to SEQ ID NO: 319 and encodes a multidomain therapeutic protein (or a multidomain therapeutic protein comprising a sequence) at least 99%, at least 99.5%, or 100% identical to SEQ ID NO: 316. In another example, the multidomain therapeutic protein coding sequence is (or comprises a sequence) at least 99%, at least 99.5%, or 100% identical to SEQ ID NO: 319 and encodes a multidomain therapeutic protein comprising the sequence set forth in SEQ ID NO: 316. In another example, the multidomain therapeutic protein coding sequence comprises the sequence set forth in SEQ ID NO: 319. In another example, the multidomain therapeutic protein coding sequence consists essentially of the sequence set forth in SEQ ID NO: 319. In another example, the multidomain therapeutic protein coding sequence consists of the sequence set forth in SEQ ID NO: 319. The multidomain therapeutic protein coding sequence can be, for example, CpG-depleted (e.g., fully CpG-depleted) and/or codon optimized. For example, the multidomain therapeutic protein coding sequence can be CpG depleted (e.g., fully CpG-depleted) and codon optimized. Optionally, the multidomain therapeutic protein coding sequence encodes a multidomain therapeutic protein (or a multidomain therapeutic protein comprising a sequence) at least 90%, at least 91%, at least 92%, at least 93%, at least 94%, at least 95%, at least 96%, at least 97%, at least 98%, at least 99%, at least 99.5%, or 100% identical to SEQ ID NO: 316 (and, e.g., retaining the activity of native GAA). Optionally, the multidomain therapeutic protein coding sequence encodes a multidomain therapeutic protein (or a multidomain therapeutic protein comprising a sequence) at least 95%, at least 96%, at least 97%, at least 98%, at least 99%, at least 99.5%, or 100% identical to SEQ ID NO: 316 (and, e.g., retaining the activity of native GAA). Optionally, the multidomain therapeutic protein coding sequence in the above examples encodes a multidomain therapeutic protein (or a multidomain therapeutic protein comprising a sequence) at least 99%, at least 99.5%, or 100% identical to SEQ ID NO: 316 (and, e.g., retaining the activity of native GAA). Optionally, the multidomain therapeutic protein coding sequence in the above examples encodes a multidomain therapeutic protein comprising the sequence set forth in SEQ ID NO: 316. Optionally, the multidomain therapeutic protein coding sequence in the above examples encodes a multidomain therapeutic protein consisting essentially of the sequence set forth in SEQ ID NO: 316. Optionally, the multidomain therapeutic protein coding sequence in the above examples encodes a multidomain therapeutic protein consisting of the sequence set forth in SEQ ID NO: 316.

[0741] The nucleic acid construct can comprise, for example, (1) a 5′ ITR (e.g., such as the one set forth in SEQ ID NO: 283), (2) a splice acceptor site (e.g., a mouse Alb exon 2 splice acceptor, such as the one set forth in SEQ ID NO: 286), (3) the multidomain therapeutic protein coding sequence, (4) a polyadenylation signal (e.g., an SV40 polyadenylation signal, such as the one set forth in SEQ ID NO: 827), and (5) a 3′ ITR (e.g., such as the one set forth in SEQ ID NO: 283 or the reverse complement thereof). In one example, the nucleic acid construct comprises a sequence at least 90%, at least 91%, at least 92%, at least 93%, at least 94%, at least 95%, at least 96%, at least 97%, at least 98%, at least 99%, at least 99.5%, or 100% identical to SEQ ID NO: 851. In another example, the nucleic acid construct comprises a sequence at least 90%, at least 91%, at least 92%, at least 93%, at least 94%, at least 95%, at least 96%, at least 97%, at least 98%, at least 99%, at least 99.5%, or 100% identical to SEQ ID NO: 851 and encodes a multidomain therapeutic protein (or a multidomain therapeutic protein comprising a sequence) at least 99%, at least 99.5%, or 100% identical to SEQ ID NO: 316. In another example, the nucleic acid construct comprises a sequence at least 90%, at least 91%, at least 92%, at least 93%, at least 94%, at least 95%, at least 96%, at least 97%, at least 98%, at least 99%, at least 99.5%, or 100% identical to SEQ ID NO: 851 and encodes a multidomain therapeutic protein comprising the sequence set forth in SEQ ID NO: 316. In another example, the nucleic acid construct comprises a sequence at least 95%, at least 96%, at least 97%, at least 98%, at least 99%, at least 99.5%, or 100% identical to SEQ ID NO: 851. In another example, the nucleic acid construct comprises a sequence at least 95%, at least 96%, at least 97%, at least 98%, at least 99%, at least 99.5%, or 100% identical to SEQ ID NO: 851 and encodes a multidomain therapeutic protein (or a multidomain therapeutic protein comprising a sequence) at least 99%, at least 99.5%, or 100% identical to SEQ ID NO: 316. In another example, the nucleic acid construct comprises a sequence at least 95%, at least 96%, at least 97%, at least 98%, at least 99%, at least 99.5%, or 100% identical to SEQ ID NO: 851 and encodes a multidomain therapeutic protein comprising the sequence set forth in SEQ ID NO: 316. In another example, the nucleic acid construct comprises a sequence at least 99%, at least 99.5%, or 100% identical to SEQ ID NO: 851. In another example, the nucleic acid construct comprises a sequence at least 99%, at least 99.5%, or 100% identical to SEQ ID NO: 851 and encodes a multidomain therapeutic protein (or a multidomain therapeutic protein comprising a sequence) at least 99%, at least 99.5%, or 100% identical to SEQ ID NO: 316. In another example, the nucleic acid construct comprises a sequence at least 99%, at least 99.5%, or 100% identical to SEQ ID NO: 851 and encodes a multidomain therapeutic protein comprising the sequence set forth in SEQ ID NO: 316. In another example, the nucleic acid construct comprises the sequence set forth in SEQ ID NO: 851. The multidomain therapeutic protein coding sequence can be, for example, CpG-depleted (e.g., fully CpG-depleted) and/or codon optimized. For example, the multidomain therapeutic protein coding sequence can be CpG depleted (e.g., fully CpG-depleted) and codon optimized. Optionally, the nucleic acid construct encodes a multidomain therapeutic protein (or a multidomain therapeutic protein comprising a sequence) at least 90%, at least 91%, at least 92%, at least 93%, at least 94%, at least 95%, at least 96%, at least 97%, at least 98%, at least 99%, at least 99.5%, or 100% identical to SEQ ID NO: 316 (and, e.g., retaining the activity of native GAA). Optionally, the nucleic acid construct encodes a multidomain therapeutic protein (or a multidomain therapeutic protein comprising a sequence) at least 95%, at least 96%, at least 97%, at least 98%, at least 99%, at least 99.5%, or 100% identical to SEQ ID NO: 316 (and, e.g., retaining the activity of native GAA). Optionally, the nucleic acid construct in the above examples encodes a multidomain therapeutic protein (or a multidomain therapeutic protein comprising a sequence) at least 99%, at least 99.5%, or 100% identical to SEQ ID NO: 316 (and, e.g., retaining the activity of native GAA). Optionally, the nucleic acid construct in the above examples encodes a multidomain therapeutic protein comprising the sequence set forth in SEQ ID NO: 316. Optionally, the nucleic acid construct in the above examples encodes a multidomain therapeutic protein consisting essentially of the sequence set forth in SEQ ID NO: 316. Optionally, the nucleic acid construct in the above examples encodes a multidomain therapeutic protein consisting of the sequence set forth in SEQ ID NO: 316.

[0742] In one example, the multidomain therapeutic protein coding sequence is (or comprises a sequence) at least 90%, at least 91%, at least 92%, at least 93%, at least 94%, at least 95%, at least 96%, at least 97%, at least 98%, at least 99%, at least 99.5%, or 100% identical to SEQ ID NO: 317. In another example, the multidomain therapeutic protein coding sequence is (or comprises a sequence) at least 90%, at least 91%, at least 92%, at least 93%, at least 94%, at least 95%, at least 96%, at least 97%, at least 98%, at least 99%, at least 99.5%, or 100% identical to SEQ ID NO: 317 and encodes a multidomain therapeutic protein (or a multidomain therapeutic protein comprising a sequence) at least 99%, at least 99.5%, or 100% identical to SEQ ID NO: 316. In another example, the multidomain therapeutic protein coding sequence is (or comprises a sequence) at least 90%, at least 91%, at least 92%, at least 93%, at least 94%, at least 95%, at least 96%, at least 97%, at least 98%, at least 99%, at least 99.5%, or 100% identical to SEQ ID NO: 317 and encodes a multidomain therapeutic protein comprising the sequence set forth in SEQ ID NO: 316. In another example, the multidomain therapeutic protein coding sequence is (or comprises a sequence) at least 95%, at least 96%, at least 97%, at least 98%, at least 99%, at least 99.5%, or 100% identical to SEQ ID NO: 317. In another example, the multidomain therapeutic protein coding sequence is (or comprises a sequence) at least 95%, at least 96%, at least 97%, at least 98%, at least 99%, at least 99.5%, or 100% identical to SEQ ID NO: 317 and encodes a multidomain therapeutic protein (or a multidomain therapeutic protein comprising a sequence) at least 99%, at least 99.5%, or 100% identical to SEQ ID NO: 316. In another example, the multidomain therapeutic protein coding sequence is (or comprises a sequence) at least 95%, at least 96%, at least 97%, at least 98%, at least 99%, at least 99.5%, or 100% identical to SEQ ID NO: 317 and encodes a multidomain therapeutic protein comprising the sequence set forth in SEQ ID NO: 316. In another example, the multidomain therapeutic protein coding sequence is (or comprises a sequence) at least 99%, at least 99.5%, or 100% identical to SEQ ID NO: 317. In another example, the multidomain therapeutic protein coding sequence is (or comprises a sequence) at least 99%, at least 99.5%, or 100% identical to SEQ ID NO: 317 and encodes a multidomain therapeutic protein (or a multidomain therapeutic protein comprising a sequence) at least 99%, at least 99.5%, or 100% identical to SEQ ID NO: 316. In another example, the multidomain therapeutic protein coding sequence is (or comprises a sequence) at least 99%, at least 99.5%, or 100% identical to SEQ ID NO: 317 and encodes a multidomain therapeutic protein comprising the sequence set forth in SEQ ID NO: 316. In another example, the multidomain therapeutic protein coding sequence comprises the sequence set forth in SEQ ID NO: 317. In another example, the multidomain therapeutic protein coding sequence consists essentially of the sequence set forth in SEQ ID NO: 317. In another example, the multidomain therapeutic protein coding sequence consists of the sequence set forth in SEQ ID NO: 317. The multidomain therapeutic protein coding sequence can be, for example, CpG-depleted (e.g., fully CpG-depleted) and/or codon optimized. For example, the multidomain therapeutic protein coding sequence can be CpG depleted (e.g., fully CpG-depleted) and codon optimized. Optionally, the multidomain therapeutic protein coding sequence encodes a multidomain therapeutic protein (or a multidomain therapeutic protein comprising a sequence) at least 90%, at least 91%, at least 92%, at least 93%, at least 94%, at least 95%, at least 96%, at least 97%, at least 98%, at least 99%, at least 99.5%, or 100% identical to SEQ ID NO: 316 (and, e.g., retaining the activity of native GAA). Optionally, the multidomain therapeutic protein coding sequence encodes a multidomain therapeutic protein (or a multidomain therapeutic protein comprising a sequence) at least 95%, at least 96%, at least 97%, at least 98%, at least 99%, at least 99.5%, or 100% identical to SEQ ID NO: 316 (and, e.g., retaining the activity of native GAA). Optionally, the multidomain therapeutic protein coding sequence in the above examples encodes a multidomain therapeutic protein (or a multidomain therapeutic protein comprising a sequence) at least 99%, at least 99.5%, or 100% identical to SEQ ID NO: 316 (and, e.g., retaining the activity of native GAA). Optionally, the multidomain therapeutic protein coding sequence in the above examples encodes a multidomain therapeutic protein comprising the sequence set forth in SEQ ID NO: 316. Optionally, the multidomain therapeutic protein coding sequence in the above examples encodes a multidomain therapeutic protein consisting essentially of the sequence set forth in SEQ ID NO: 316. Optionally, the multidomain therapeutic protein coding sequence in the above examples encodes a multidomain therapeutic protein consisting of the sequence set forth in SEQ ID NO: 316.

[0743] In some cases, the anti-hTfR:GAA scFv fusion proteins in the format V_{L}-(Gly₄Ser)₃-V_{H}:GAA (Gly₄Ser=SEQ ID NO: 718). In a specific example of a multidomain therapeutic protein nucleic acid construct, the encoded multidomain therapeutic protein can comprise any one of SEQ ID NOS: 688-691 and 793-820 or can be at least 90%, at least 91%, at least 92%, at least 93%, at least 94%, at least 95%, at least 96%, at least 97%, at least 98%, at least 99%, or at least 99.5% identical to any one of SEQ ID NOS: 688-691 and 793-820. In another specific example, the multidomain therapeutic protein can consist essentially of any one of SEQ ID NOS: 688-691 and 793-820. In another specific example, the multidomain therapeutic protein can consist of any one of SEQ ID NOS: 688-691 and 793-820.

[0744] In a specific example of a multidomain therapeutic protein nucleic acid construct, the encoded multidomain therapeutic protein can comprise SEQ ID NO: 688 or can be at least 90%, at least 91%, at least 92%, at least 93%, at least 94%, at least 95%, at least 96%, at least 97%, at least 98%, at least 99%, or at least 99.5% identical to SEQ ID NO: 688. In another specific example, the multidomain therapeutic protein can consist essentially of SEQ ID NO: 688. In another specific example, the multidomain therapeutic protein can consist of SEQ ID NO: 688.

[0745] In a specific example of a multidomain therapeutic protein nucleic acid construct, the encoded multidomain therapeutic protein can comprise SEQ ID NO: 689 or can be at least 90%, at least 91%, at least 92%, at least 93%, at least 94%, at least 95%, at least 96%, at least 97%, at least 98%, at least 99%, or at least 99.5% identical to SEQ ID NO: 689. In another specific example, the multidomain therapeutic protein can consist essentially of SEQ ID NO: 689. In another specific example, the multidomain therapeutic protein can consist of SEQ ID NO: 689.

[0746] In a specific example of a multidomain therapeutic protein nucleic acid construct, the encoded multidomain therapeutic protein can comprise SEQ ID NO: 690 or can be at least 90%, at least 91%, at least 92%, at least 93%, at least 94%, at least 95%, at least 96%, at least 97%, at least 98%, at least 99%, or at least 99.5% identical to SEQ ID NO: 690. In another specific example, the multidomain therapeutic protein can consist essentially of SEQ ID NO: 690. In another specific example, the multidomain therapeutic protein can consist of SEQ ID NO: 690.

[0747] In a specific example of a multidomain therapeutic protein nucleic acid construct, the encoded multidomain therapeutic protein can comprise SEQ ID NO: 691 or can be at least 90%, at least 91%, at least 92%, at least 93%, at least 94%, at least 95%, at least 96%, at least 97%, at least 98%, at least 99%, or at least 99.5% identical to SEQ ID NO: 691. In another specific example, the multidomain therapeutic protein can consist essentially of SEQ ID NO: 691. In another specific example, the multidomain therapeutic protein can consist of SEQ ID NO: 691.

[0748] In some cases, the anti-hTfR:GAA scFv fusion proteins in the format V_{H}-(Gly₄Ser)₃-V_{L}:GAA (Gly₄Ser=SEQ ID NO: 718). In a specific example of a multidomain therapeutic protein nucleic acid construct, the encoded multidomain therapeutic protein can comprise any one of SEQ ID NOS: 821-824 (optionally lacking the N-terminal MHRPRRRGTRPPPLALLAALLLAARGADA sequence) or can be at least 90%, at least 91%, at least 92%, at least 93%, at least 94%, at least 95%, at least 96%, at least 97%, at least 98%, at least 99%, or at least 99.5% identical to any one of SEQ ID NOS: 821-824 (optionally lacking the N-terminal MHRPRRRGTRPPPLALLAALLLAARGADA sequence). In another specific example, the multidomain therapeutic protein can consist essentially of any one of SEQ ID NOS: 821-824 (optionally lacking the N-terminal MHRPRRRGTRPPPLALLAALLLAARGADA sequence). In another specific example, the multidomain therapeutic protein can consist of any one of SEQ ID NOS: 821-824 (optionally lacking the N-terminal MHRPRRRGTRPPPLALLAALLLAARGADA sequence).

[0749] Various multidomain therapeutic protein coding sequences are provided. In one example, the multidomain therapeutic protein coding sequence is (or comprises a sequence) at least 90%, at least 91%, at least 92%, at least 93%, at least 94%, at least 95%, at least 96%, at least 97%, at least 98%, at least 99%, at least 99.5%, or 100% identical to any one of SEQ ID NOS: 692-704. In another example, the multidomain therapeutic protein coding sequence is (or comprises a sequence) at least 95%, at least 96%, at least 97%, at least 98%, at least 99%, at least 99.5%, or 100% identical to any one of SEQ ID NOS: 692-704. In another example, the multidomain therapeutic protein coding sequence is (or comprises a sequence) at least 99%, at least 99.5%, or 100% identical to any one of SEQ ID NOS: 692-704. In another example, the multidomain therapeutic protein coding sequence comprises the sequence set forth in any one of SEQ ID NOS: 692-704. In another example, the multidomain therapeutic protein coding sequence consists essentially of the sequence set forth in any one of SEQ ID NOS: 692-704. In another example, the multidomain therapeutic protein coding sequence consists of the sequence set forth in any one of SEQ ID NOS: 692-704. Optionally, the multidomain therapeutic protein coding sequence encodes a multidomain therapeutic protein (or a multidomain therapeutic protein comprising a sequence) at least 90%, at least 91%, at least 92%, at least 93%, at least 94%, at least 95%, at least 96%, at least 97%, at least 98%, at least 99%, at least 99.5%, or 100% identical to any one of SEQ ID NOS: 688-691 (and, e.g., retaining the activity of native GAA). Optionally, the multidomain therapeutic protein coding sequence encodes a multidomain therapeutic protein (or a multidomain therapeutic protein comprising a sequence) at least 95%, at least 96%, at least 97%, at least 98%, at least 99%, at least 99.5%, or 100% identical to any one of SEQ ID NOS: 688-691 (and, e.g., retaining the activity of native GAA). Optionally, the multidomain therapeutic protein coding sequence in the above examples encodes a multidomain therapeutic protein (or a multidomain therapeutic protein comprising a sequence) at least 99%, at least 99.5%, or 100% identical to any one of SEQ ID NOS: 688-691 (and, e.g., retaining the activity of native GAA). Optionally, the multidomain therapeutic protein coding sequence in the above examples encodes a multidomain therapeutic protein comprising the sequence set forth in any one of SEQ ID NOS: 688-691. Optionally, the multidomain therapeutic protein coding sequence in the above examples encodes a multidomain therapeutic protein consisting essentially of the sequence set forth in any one of SEQ ID NOS: 688-691. Optionally, the multidomain therapeutic protein coding sequence in the above examples encodes a multidomain therapeutic protein consisting of the sequence set forth in any one of SEQ ID NOS: 688-691.

[0750] Various codon optimized multidomain therapeutic protein coding sequences are provided. The multidomain therapeutic protein coding sequence can be, for example, CpG-depleted (e.g., fully CpG depleted) and/or codon optimized (e.g., CpG depleted (e.g., fully CpG-depleted) and codon optimized). In one example, the multidomain therapeutic protein coding sequence is (or comprises a sequence) at least 90%, at least 91%, at least 92%, at least 93%, at least 94%, at least 95%, at least 96%, at least 97%, at least 98%, at least 99%, at least 99.5%, or 100% identical to any one of SEQ ID NOS: 696-704. In another example, the multidomain therapeutic protein coding sequence is (or comprises a sequence) at least 95%, at least 96%, at least 97%, at least 98%, at least 99%, at least 99.5%, or 100% identical to any one of SEQ ID NOS: 696-704. In another example, the multidomain therapeutic protein coding sequence is (or comprises a sequence) at least 99%, at least 99.5%, or 100% identical to any one of SEQ ID NOS: 696-704. In another example, the multidomain therapeutic protein coding sequence comprises the sequence set forth in any one of SEQ ID NOS: 696-704. In another example, the multidomain therapeutic protein coding sequence consists essentially of the sequence set forth in any one of SEQ ID NOS: 696-704. In another example, the multidomain therapeutic protein coding sequence consists of the sequence set forth in any one of SEQ ID NOS: 696-704. Optionally, the multidomain therapeutic protein coding sequence encodes a multidomain therapeutic protein (or a multidomain therapeutic protein comprising a sequence) at least 90%, at least 91%, at least 92%, at least 93%, at least 94%, at least 95%, at least 96%, at least 97%, at least 98%, at least 99%, at least 99.5%, or 100% identical to any one of SEQ ID NOS: 688-691 (and, e.g., retaining the activity of native GAA). Optionally, the multidomain therapeutic protein coding sequence encodes a multidomain therapeutic protein (or a multidomain therapeutic protein comprising a sequence) at least 95%, at least 96%, at least 97%, at least 98%, at least 99%, at least 99.5%, or 100% identical to any one of SEQ ID NOS: 688-691 (and, e.g., retaining the activity of native GAA). Optionally, the GAA coding sequence in the above examples encodes a multidomain therapeutic protein (or a multidomain therapeutic protein comprising a sequence) at least 99%, at least 99.5%, or 100% identical to any one of SEQ ID NOS: 688-691 (and, e.g., retaining the activity of native GAA). Optionally, the multidomain therapeutic protein coding sequence in the above examples encodes a multidomain therapeutic protein comprising the sequence set forth in any one of SEQ ID NOS: 688-691. Optionally, the multidomain therapeutic protein coding sequence in the above examples encodes a multidomain therapeutic protein consisting essentially of the sequence set forth in any one of SEQ ID NOS: 688-691. Optionally, the multidomain therapeutic protein coding sequence in the above examples encodes a multidomain therapeutic protein consisting of the sequence set forth in any one of SEQ ID NOS: 688-691.

[0751] Various multidomain therapeutic protein coding sequences are provided. In one example, the multidomain therapeutic protein coding sequence is (or comprises a sequence) at least 90%, at least 91%, at least 92%, at least 93%, at least 94%, at least 95%, at least 96%, at least 97%, at least 98%, at least 99%, at least 99.5%, or 100% identical to any one of SEQ ID NOS: 695 and 702-704. In another example, the multidomain therapeutic protein coding sequence is (or comprises a sequence) at least 95%, at least 96%, at least 97%, at least 98%, at least 99%, at least 99.5%, or 100% identical to any one of SEQ ID NOS: 695 and 702-704. In another example, the multidomain therapeutic protein coding sequence is (or comprises a sequence) at least 99%, at least 99.5%, or 100% identical to any one of SEQ ID NOS: 695 and 702-704. In another example, the multidomain therapeutic protein coding sequence comprises the sequence set forth in any one of SEQ ID NOS: 695 and 702-704. In another example, the multidomain therapeutic protein coding sequence consists essentially of the sequence set forth in any one of SEQ ID NOS: 695 and 702-704. In another example, the multidomain therapeutic protein coding sequence consists of the sequence set forth in any one of SEQ ID NOS: 695 and 702-704. Optionally, the multidomain therapeutic protein coding sequence encodes a multidomain therapeutic protein (or a multidomain therapeutic protein comprising a sequence) at least 90%, at least 91%, at least 92%, at least 93%, at least 94%, at least 95%, at least 96%, at least 97%, at least 98%, at least 99%, at least 99.5%, or 100% identical to SEQ ID NO: 691 (and, e.g., retaining the activity of native GAA). Optionally, the multidomain therapeutic protein coding sequence encodes a multidomain therapeutic protein (or a multidomain therapeutic protein comprising a sequence) at least 95%, at least 96%, at least 97%, at least 98%, at least 99%, at least 99.5%, or 100% identical to SEQ ID NO: 691 (and, e.g., retaining the activity of native GAA). Optionally, the multidomain therapeutic protein coding sequence in the above examples encodes a multidomain therapeutic protein (or a multidomain therapeutic protein comprising a sequence) at least 99%, at least 99.5%, or 100% identical to SEQ ID NO: 691 (and, e.g., retaining the activity of native GAA). Optionally, the multidomain therapeutic protein coding sequence in the above examples encodes a multidomain therapeutic protein comprising the sequence set forth in SEQ ID NO: 691. Optionally, the multidomain therapeutic protein coding sequence in the above examples encodes a multidomain therapeutic protein consisting essentially of the sequence set forth in SEQ ID NO: 691. Optionally, the multidomain therapeutic protein coding sequence in the above examples encodes a multidomain therapeutic protein consisting of the sequence set forth in SEQ ID NO: 691.

[0752] Various codon optimized multidomain therapeutic protein coding sequences are provided. The multidomain therapeutic protein coding sequence can be, for example, CpG-depleted (e.g., fully CpG depleted) and/or codon optimized (e.g., CpG depleted (e.g., fully CpG-depleted) and codon optimized). In one example, the multidomain therapeutic protein coding sequence is (or comprises a sequence) at least 90%, at least 91%, at least 92%, at least 93%, at least 94%, at least 95%, at least 96%, at least 97%, at least 98%, at least 99%, at least 99.5%, or 100% identical to any one of SEQ ID NOS: 702-704. In another example, the multidomain therapeutic protein coding sequence is (or comprises a sequence) at least 95%, at least 96%, at least 97%, at least 98%, at least 99%, at least 99.5%, or 100% identical to any one of SEQ ID NOS: 702-704. In another example, the multidomain therapeutic protein coding sequence is (or comprises a sequence) at least 99%, at least 99.5%, or 100% identical to any one of SEQ ID NOS: 702-704. In another example, the multidomain therapeutic protein coding sequence comprises the sequence set forth in any one of SEQ ID NOS: 702-704. In another example, the multidomain therapeutic protein coding sequence consists essentially of the sequence set forth in any one of SEQ ID NOS: 702-704. In another example, the multidomain therapeutic protein coding sequence consists of the sequence set forth in any one of SEQ ID NOS: 702-704. Optionally, the multidomain therapeutic protein coding sequence encodes a multidomain therapeutic protein (or a multidomain therapeutic protein comprising a sequence) at least 90%, at least 91%, at least 92%, at least 93%, at least 94%, at least 95%, at least 96%, at least 97%, at least 98%, at least 99%, at least 99.5%, or 100% identical to SEQ ID NO: 691 (and, e.g., retaining the activity of native GAA). Optionally, the multidomain therapeutic protein coding sequence encodes a multidomain therapeutic protein (or a multidomain therapeutic protein comprising a sequence) at least 95%, at least 96%, at least 97%, at least 98%, at least 99%, at least 99.5%, or 100% identical to SEQ ID NO: 691 (and, e.g., retaining the activity of native GAA). Optionally, the GAA coding sequence in the above examples encodes a multidomain therapeutic protein (or a multidomain therapeutic protein comprising a sequence) at least 99%, at least 99.5%, or 100% identical to SEQ ID NO: 691 (and, e.g., retaining the activity of native GAA). Optionally, the multidomain therapeutic protein coding sequence in the above examples encodes a multidomain therapeutic protein comprising the sequence set forth in SEQ ID NO: 691. Optionally, the multidomain therapeutic protein coding sequence in the above examples encodes a multidomain therapeutic protein consisting essentially of the sequence set forth in SEQ ID NO: 691. Optionally, the multidomain therapeutic protein coding sequence in the above examples encodes a multidomain therapeutic protein consisting of the sequence set forth in SEQ ID NO: 691.

[0753] In one example, the multidomain therapeutic protein coding sequence is (or comprises a sequence) at least 90%, at least 91%, at least 92%, at least 93%, at least 94%, at least 95%, at least 96%, at least 97%, at least 98%, at least 99%, at least 99.5%, or 100% identical to SEQ ID NO: 702. In another example, the multidomain therapeutic protein coding sequence is (or comprises a sequence) at least 90%, at least 91%, at least 92%, at least 93%, at least 94%, at least 95%, at least 96%, at least 97%, at least 98%, at least 99%, at least 99.5%, or 100% identical to SEQ ID NO: 702 and encodes a multidomain therapeutic protein (or a multidomain therapeutic protein comprising a sequence) at least 99%, at least 99.5%, or 100% identical to SEQ ID NO: 691. In another example, the multidomain therapeutic protein coding sequence is (or comprises a sequence) at least 90%, at least 91%, at least 92%, at least 93%, at least 94%, at least 95%, at least 96%, at least 97%, at least 98%, at least 99%, at least 99.5%, or 100% identical to SEQ ID NO: 702 and encodes a multidomain therapeutic protein comprising the sequence set forth in SEQ ID NO: 691. In another example, the multidomain therapeutic protein coding sequence is (or comprises a sequence) at least 95%, at least 96%, at least 97%, at least 98%, at least 99%, at least 99.5%, or 100% identical to SEQ ID NO: 702. In another example, the multidomain therapeutic protein coding sequence is (or comprises a sequence) at least 95%, at least 96%, at least 97%, at least 98%, at least 99%, at least 99.5%, or 100% identical to SEQ ID NO: 702 and encodes a multidomain therapeutic protein (or a multidomain therapeutic protein comprising a sequence) at least 99%, at least 99.5%, or 100% identical to SEQ ID NO: 691. In another example, the multidomain therapeutic protein coding sequence is (or comprises a sequence) at least 95%, at least 96%, at least 97%, at least 98%, at least 99%, at least 99.5%, or 100% identical to SEQ ID NO: 702 and encodes a multidomain therapeutic protein comprising the sequence set forth in SEQ ID NO: 691. In another example, the multidomain therapeutic protein coding sequence is (or comprises a sequence) at least 99%, at least 99.5%, or 100% identical to SEQ ID NO: 702. In another example, the multidomain therapeutic protein coding sequence is (or comprises a sequence) at least 99%, at least 99.5%, or 100% identical to SEQ ID NO: 702 and encodes a multidomain therapeutic protein (or a multidomain therapeutic protein comprising a sequence) at least 99%, at least 99.5%, or 100% identical to SEQ ID NO: 691. In another example, the multidomain therapeutic protein coding sequence is (or comprises a sequence) at least 99%, at least 99.5%, or 100% identical to SEQ ID NO: 702 and encodes a multidomain therapeutic protein comprising the sequence set forth in SEQ ID NO: 691. In another example, the multidomain therapeutic protein coding sequence comprises the sequence set forth in SEQ ID NO: 702. In another example, the multidomain therapeutic protein coding sequence consists essentially of the sequence set forth in SEQ ID NO: 702. In another example, the multidomain therapeutic protein coding sequence consists of the sequence set forth in SEQ ID NO: 702. The multidomain therapeutic protein coding sequence can be, for example, CpG-depleted (e.g., fully CpG-depleted) and/or codon optimized. For example, the multidomain therapeutic protein coding sequence can be CpG depleted (e.g., fully CpG-depleted) and codon optimized. Optionally, the multidomain therapeutic protein coding sequence encodes a multidomain therapeutic protein (or a multidomain therapeutic protein comprising a sequence) at least 90%, at least 91%, at least 92%, at least 93%, at least 94%, at least 95%, at least 96%, at least 97%, at least 98%, at least 99%, at least 99.5%, or 100% identical to SEQ ID NO: 691 (and, e.g., retaining the activity of native GAA). Optionally, the multidomain therapeutic protein coding sequence encodes a multidomain therapeutic protein (or a multidomain therapeutic protein comprising a sequence) at least 95%, at least 96%, at least 97%, at least 98%, at least 99%, at least 99.5%, or 100% identical to SEQ ID NO: 691 (and, e.g., retaining the activity of native GAA). Optionally, the multidomain therapeutic protein coding sequence in the above examples encodes a multidomain therapeutic protein (or a multidomain therapeutic protein comprising a sequence) at least 99%, at least 99.5%, or 100% identical to SEQ ID NO: 691 (and, e.g., retaining the activity of native GAA). Optionally, the multidomain therapeutic protein coding sequence in the above examples encodes a multidomain therapeutic protein comprising the sequence set forth in SEQ ID NO: 691. Optionally, the multidomain therapeutic protein coding sequence in the above examples encodes a multidomain therapeutic protein consisting essentially of the sequence set forth in SEQ ID NO: 691. Optionally, the multidomain therapeutic protein coding sequence in the above examples encodes a multidomain therapeutic protein consisting of the sequence set forth in SEQ ID NO: 691.

[0754] The nucleic acid construct can comprise, for example, (1) a 5′ ITR (e.g., such as the one set forth in SEQ ID NO: 283), (2) a splice acceptor site (e.g., a mouse Alb exon 2 splice acceptor, such as the one set forth in SEQ ID NO: 286), (3) the multidomain therapeutic protein coding sequence, (4) a polyadenylation signal (e.g., an SV40 polyadenylation signal, such as the one set forth in SEQ ID NO: 827), and (5) a 3′ ITR (e.g., such as the one set forth in SEQ ID NO: 283 or the reverse complement thereof). In one example, the nucleic acid construct comprises a sequence at least 90%, at least 91%, at least 92%, at least 93%, at least 94%, at least 95%, at least 96%, at least 97%, at least 98%, at least 99%, at least 99.5%, or 100% identical to SEQ ID NO: 848. In another example, the nucleic acid construct comprises a sequence at least 90%, at least 91%, at least 92%, at least 93%, at least 94%, at least 95%, at least 96%, at least 97%, at least 98%, at least 99%, at least 99.5%, or 100% identical to SEQ ID NO: 848 and encodes a multidomain therapeutic protein (or a multidomain therapeutic protein comprising a sequence) at least 99%, at least 99.5%, or 100% identical to SEQ ID NO: 691. In another example, the nucleic acid construct comprises a sequence at least 90%, at least 91%, at least 92%, at least 93%, at least 94%, at least 95%, at least 96%, at least 97%, at least 98%, at least 99%, at least 99.5%, or 100% identical to SEQ ID NO: 848 and encodes a multidomain therapeutic protein comprising the sequence set forth in SEQ ID NO: 691. In another example, the nucleic acid construct comprises a sequence at least 95%, at least 96%, at least 97%, at least 98%, at least 99%, at least 99.5%, or 100% identical to SEQ ID NO: 848. In another example, the nucleic acid construct comprises a sequence at least 95%, at least 96%, at least 97%, at least 98%, at least 99%, at least 99.5%, or 100% identical to SEQ ID NO: 848 and encodes a multidomain therapeutic protein (or a multidomain therapeutic protein comprising a sequence) at least 99%, at least 99.5%, or 100% identical to SEQ ID NO: 691. In another example, the nucleic acid construct comprises a sequence at least 95%, at least 96%, at least 97%, at least 98%, at least 99%, at least 99.5%, or 100% identical to SEQ ID NO: 848 and encodes a multidomain therapeutic protein comprising the sequence set forth in SEQ ID NO: 691. In another example, the nucleic acid construct comprises a sequence at least 99%, at least 99.5%, or 100% identical to SEQ ID NO: 848. In another example, the nucleic acid construct comprises a sequence at least 99%, at least 99.5%, or 100% identical to SEQ ID NO: 848 and encodes a multidomain therapeutic protein (or a multidomain therapeutic protein comprising a sequence) at least 99%, at least 99.5%, or 100% identical to SEQ ID NO: 691. In another example, the nucleic acid construct comprises a sequence at least 99%, at least 99.5%, or 100% identical to SEQ ID NO: 848 and encodes a multidomain therapeutic protein comprising the sequence set forth in SEQ ID NO: 691. In another example, the nucleic acid construct comprises the sequence set forth in SEQ ID NO: 848. The multidomain therapeutic protein coding sequence can be, for example, CpG-depleted (e.g., fully CpG-depleted) and/or codon optimized. For example, the multidomain therapeutic protein coding sequence can be CpG depleted (e.g., fully CpG-depleted) and codon optimized. Optionally, the nucleic acid construct encodes a multidomain therapeutic protein (or a multidomain therapeutic protein comprising a sequence) at least 90%, at least 91%, at least 92%, at least 93%, at least 94%, at least 95%, at least 96%, at least 97%, at least 98%, at least 99%, at least 99.5%, or 100% identical to SEQ ID NO: 691 (and, e.g., retaining the activity of native GAA). Optionally, the nucleic acid construct encodes a multidomain therapeutic protein (or a multidomain therapeutic protein comprising a sequence) at least 95%, at least 96%, at least 97%, at least 98%, at least 99%, at least 99.5%, or 100% identical to SEQ ID NO: 691 (and, e.g., retaining the activity of native GAA). Optionally, the nucleic acid construct in the above examples encodes a multidomain therapeutic protein (or a multidomain therapeutic protein comprising a sequence) at least 99%, at least 99.5%, or 100% identical to SEQ ID NO: 691 (and, e.g., retaining the activity of native GAA). Optionally, the nucleic acid construct in the above examples encodes a multidomain therapeutic protein comprising the sequence set forth in SEQ ID NO: 691. Optionally, the nucleic acid construct in the above examples encodes a multidomain therapeutic protein consisting essentially of the sequence set forth in SEQ ID NO: 691. Optionally, the nucleic acid construct in the above examples encodes a multidomain therapeutic protein consisting of the sequence set forth in SEQ ID NO: 691.

[0755] In one example, the multidomain therapeutic protein coding sequence is (or comprises a sequence) at least 90%, at least 91%, at least 92%, at least 93%, at least 94%, at least 95%, at least 96%, at least 97%, at least 98%, at least 99%, at least 99.5%, or 100% identical to SEQ ID NO: 703. In another example, the multidomain therapeutic protein coding sequence is (or comprises a sequence) at least 90%, at least 91%, at least 92%, at least 93%, at least 94%, at least 95%, at least 96%, at least 97%, at least 98%, at least 99%, at least 99.5%, or 100% identical to SEQ ID NO: 703 and encodes a multidomain therapeutic protein (or a multidomain therapeutic protein comprising a sequence) at least 99%, at least 99.5%, or 100% identical to SEQ ID NO: 691. In another example, the multidomain therapeutic protein coding sequence is (or comprises a sequence) at least 90%, at least 91%, at least 92%, at least 93%, at least 94%, at least 95%, at least 96%, at least 97%, at least 98%, at least 99%, at least 99.5%, or 100% identical to SEQ ID NO: 703 and encodes a multidomain therapeutic protein comprising the sequence set forth in SEQ ID NO: 691. In another example, the multidomain therapeutic protein coding sequence is (or comprises a sequence) at least 95%, at least 96%, at least 97%, at least 98%, at least 99%, at least 99.5%, or 100% identical to SEQ ID NO: 703. In another example, the multidomain therapeutic protein coding sequence is (or comprises a sequence) at least 95%, at least 96%, at least 97%, at least 98%, at least 99%, at least 99.5%, or 100% identical to SEQ ID NO: 703 and encodes a multidomain therapeutic protein (or a multidomain therapeutic protein comprising a sequence) at least 99%, at least 99.5%, or 100% identical to SEQ ID NO: 691. In another example, the multidomain therapeutic protein coding sequence is (or comprises a sequence) at least 95%, at least 96%, at least 97%, at least 98%, at least 99%, at least 99.5%, or 100% identical to SEQ ID NO: 703 and encodes a multidomain therapeutic protein comprising the sequence set forth in SEQ ID NO: 691. In another example, the multidomain therapeutic protein coding sequence is (or comprises a sequence) at least 99%, at least 99.5%, or 100% identical to SEQ ID NO: 703. In another example, the multidomain therapeutic protein coding sequence is (or comprises a sequence) at least 99%, at least 99.5%, or 100% identical to SEQ ID NO: 703 and encodes a multidomain therapeutic protein (or a multidomain therapeutic protein comprising a sequence) at least 99%, at least 99.5%, or 100% identical to SEQ ID NO: 691. In another example, the multidomain therapeutic protein coding sequence is (or comprises a sequence) at least 99%, at least 99.5%, or 100% identical to SEQ ID NO: 703 and encodes a multidomain therapeutic protein comprising the sequence set forth in SEQ ID NO: 691. In another example, the multidomain therapeutic protein coding sequence comprises the sequence set forth in SEQ ID NO: 703. In another example, the multidomain therapeutic protein coding sequence consists essentially of the sequence set forth in SEQ ID NO: 703. In another example, the multidomain therapeutic protein coding sequence consists of the sequence set forth in SEQ ID NO: 703. The multidomain therapeutic protein coding sequence can be, for example, CpG-depleted (e.g., fully CpG-depleted) and/or codon optimized. For example, the multidomain therapeutic protein coding sequence can be CpG depleted (e.g., fully CpG-depleted) and codon optimized. Optionally, the multidomain therapeutic protein coding sequence encodes a multidomain therapeutic protein (or a multidomain therapeutic protein comprising a sequence) at least 90%, at least 91%, at least 92%, at least 93%, at least 94%, at least 95%, at least 96%, at least 97%, at least 98%, at least 99%, at least 99.5%, or 100% identical to SEQ ID NO: 691 (and, e.g., retaining the activity of native GAA). Optionally, the multidomain therapeutic protein coding sequence encodes a multidomain therapeutic protein (or a multidomain therapeutic protein comprising a sequence) at least 95%, at least 96%, at least 97%, at least 98%, at least 99%, at least 99.5%, or 100% identical to SEQ ID NO: 691 (and, e.g., retaining the activity of native GAA). Optionally, the multidomain therapeutic protein coding sequence in the above examples encodes a multidomain therapeutic protein (or a multidomain therapeutic protein comprising a sequence) at least 99%, at least 99.5%, or 100% identical to SEQ ID NO: 691 (and, e.g., retaining the activity of native GAA). Optionally, the multidomain therapeutic protein coding sequence in the above examples encodes a multidomain therapeutic protein comprising the sequence set forth in SEQ ID NO: 691. Optionally, the multidomain therapeutic protein coding sequence in the above examples encodes a multidomain therapeutic protein consisting essentially of the sequence set forth in SEQ ID NO: 691. Optionally, the multidomain therapeutic protein coding sequence in the above examples encodes a multidomain therapeutic protein consisting of the sequence set forth in SEQ ID NO: 691.

[0756] The nucleic acid construct can comprise, for example, (1) a 5′ ITR (e.g., such as the one set forth in SEQ ID NO: 283), (2) a splice acceptor site (e.g., a mouse Alb exon 2 splice acceptor, such as the one set forth in SEQ ID NO: 286), (3) the multidomain therapeutic protein coding sequence, (4) a polyadenylation signal (e.g., an SV40 polyadenylation signal, such as the one set forth in SEQ ID NO: 827), and (5) a 3′ ITR (e.g., such as the one set forth in SEQ ID NO: 283 or the reverse complement thereof). In one example, the nucleic acid construct comprises a sequence at least 90%, at least 91%, at least 92%, at least 93%, at least 94%, at least 95%, at least 96%, at least 97%, at least 98%, at least 99%, at least 99.5%, or 100% identical to SEQ ID NO: 849. In another example, the nucleic acid construct comprises a sequence at least 90%, at least 91%, at least 92%, at least 93%, at least 94%, at least 95%, at least 96%, at least 97%, at least 98%, at least 99%, at least 99.5%, or 100% identical to SEQ ID NO: 849 and encodes a multidomain therapeutic protein (or a multidomain therapeutic protein comprising a sequence) at least 99%, at least 99.5%, or 100% identical to SEQ ID NO: 691. In another example, the nucleic acid construct comprises a sequence at least 90%, at least 91%, at least 92%, at least 93%, at least 94%, at least 95%, at least 96%, at least 97%, at least 98%, at least 99%, at least 99.5%, or 100% identical to SEQ ID NO: 849 and encodes a multidomain therapeutic protein comprising the sequence set forth in SEQ ID NO: 691. In another example, the nucleic acid construct comprises a sequence at least 95%, at least 96%, at least 97%, at least 98%, at least 99%, at least 99.5%, or 100% identical to SEQ ID NO: 849. In another example, the nucleic acid construct comprises a sequence at least 95%, at least 96%, at least 97%, at least 98%, at least 99%, at least 99.5%, or 100% identical to SEQ ID NO: 849 and encodes a multidomain therapeutic protein (or a multidomain therapeutic protein comprising a sequence) at least 99%, at least 99.5%, or 100% identical to SEQ ID NO: 691. In another example, the nucleic acid construct comprises a sequence at least 95%, at least 96%, at least 97%, at least 98%, at least 99%, at least 99.5%, or 100% identical to SEQ ID NO: 849 and encodes a multidomain therapeutic protein comprising the sequence set forth in SEQ ID NO: 691. In another example, the nucleic acid construct comprises a sequence at least 99%, at least 99.5%, or 100% identical to SEQ ID NO: 849. In another example, the nucleic acid construct comprises a sequence at least 99%, at least 99.5%, or 100% identical to SEQ ID NO: 849 and encodes a multidomain therapeutic protein (or a multidomain therapeutic protein comprising a sequence) at least 99%, at least 99.5%, or 100% identical to SEQ ID NO: 691. In another example, the nucleic acid construct comprises a sequence at least 99%, at least 99.5%, or 100% identical to SEQ ID NO: 849 and encodes a multidomain therapeutic protein comprising the sequence set forth in SEQ ID NO: 691. In another example, the nucleic acid construct comprises the sequence set forth in SEQ ID NO: 849. The multidomain therapeutic protein coding sequence can be, for example, CpG-depleted (e.g., fully CpG-depleted) and/or codon optimized. For example, the multidomain therapeutic protein coding sequence can be CpG depleted (e.g., fully CpG-depleted) and codon optimized. Optionally, the nucleic acid construct encodes a multidomain therapeutic protein (or a multidomain therapeutic protein comprising a sequence) at least 90%, at least 91%, at least 92%, at least 93%, at least 94%, at least 95%, at least 96%, at least 97%, at least 98%, at least 99%, at least 99.5%, or 100% identical to SEQ ID NO: 691 (and, e.g., retaining the activity of native GAA). Optionally, the nucleic acid construct encodes a multidomain therapeutic protein (or a multidomain therapeutic protein comprising a sequence) at least 95%, at least 96%, at least 97%, at least 98%, at least 99%, at least 99.5%, or 100% identical to SEQ ID NO: 691 (and, e.g., retaining the activity of native GAA). Optionally, the nucleic acid construct in the above examples encodes a multidomain therapeutic protein (or a multidomain therapeutic protein comprising a sequence) at least 99%, at least 99.5%, or 100% identical to SEQ ID NO: 691 (and, e.g., retaining the activity of native GAA). Optionally, the nucleic acid construct in the above examples encodes a multidomain therapeutic protein comprising the sequence set forth in SEQ ID NO: 691. Optionally, the nucleic acid construct in the above examples encodes a multidomain therapeutic protein consisting essentially of the sequence set forth in SEQ ID NO: 691. Optionally, the nucleic acid construct in the above examples encodes a multidomain therapeutic protein consisting of the sequence set forth in SEQ ID NO: 691.

[0757] In one example, the multidomain therapeutic protein coding sequence is (or comprises a sequence) at least 90%, at least 91%, at least 92%, at least 93%, at least 94%, at least 95%, at least 96%, at least 97%, at least 98%, at least 99%, at least 99.5%, or 100% identical to SEQ ID NO: 704. In another example, the multidomain therapeutic protein coding sequence is (or comprises a sequence) at least 90%, at least 91%, at least 92%, at least 93%, at least 94%, at least 95%, at least 96%, at least 97%, at least 98%, at least 99%, at least 99.5%, or 100% identical to SEQ ID NO: 704 and encodes a multidomain therapeutic protein (or a multidomain therapeutic protein comprising a sequence) at least 99%, at least 99.5%, or 100% identical to SEQ ID NO: 691. In another example, the multidomain therapeutic protein coding sequence is (or comprises a sequence) at least 90%, at least 91%, at least 92%, at least 93%, at least 94%, at least 95%, at least 96%, at least 97%, at least 98%, at least 99%, at least 99.5%, or 100% identical to SEQ ID NO: 704 and encodes a multidomain therapeutic protein comprising the sequence set forth in SEQ ID NO: 691. In another example, the multidomain therapeutic protein coding sequence is (or comprises a sequence) at least 95%, at least 96%, at least 97%, at least 98%, at least 99%, at least 99.5%, or 100% identical to SEQ ID NO: 704. In another example, the multidomain therapeutic protein coding sequence is (or comprises a sequence) at least 95%, at least 96%, at least 97%, at least 98%, at least 99%, at least 99.5%, or 100% identical to SEQ ID NO: 704 and encodes a multidomain therapeutic protein (or a multidomain therapeutic protein comprising a sequence) at least 99%, at least 99.5%, or 100% identical to SEQ ID NO: 691. In another example, the multidomain therapeutic protein coding sequence is (or comprises a sequence) at least 95%, at least 96%, at least 97%, at least 98%, at least 99%, at least 99.5%, or 100% identical to SEQ ID NO: 704 and encodes a multidomain therapeutic protein comprising the sequence set forth in SEQ ID NO: 691. In another example, the multidomain therapeutic protein coding sequence is (or comprises a sequence) at least 99%, at least 99.5%, or 100% identical to SEQ ID NO: 704. In another example, the multidomain therapeutic protein coding sequence is (or comprises a sequence) at least 99%, at least 99.5%, or 100% identical to SEQ ID NO: 704 and encodes a multidomain therapeutic protein (or a multidomain therapeutic protein comprising a sequence) at least 99%, at least 99.5%, or 100% identical to SEQ ID NO: 691. In another example, the multidomain therapeutic protein coding sequence is (or comprises a sequence) at least 99%, at least 99.5%, or 100% identical to SEQ ID NO: 704 and encodes a multidomain therapeutic protein comprising the sequence set forth in SEQ ID NO: 691. In another example, the multidomain therapeutic protein coding sequence comprises the sequence set forth in SEQ ID NO: 704. In another example, the multidomain therapeutic protein coding sequence consists essentially of the sequence set forth in SEQ ID NO: 704. In another example, the multidomain therapeutic protein coding sequence consists of the sequence set forth in SEQ ID NO: 704. The multidomain therapeutic protein coding sequence can be, for example, CpG-depleted (e.g., fully CpG-depleted) and/or codon optimized. For example, the multidomain therapeutic protein coding sequence can be CpG depleted (e.g., fully CpG-depleted) and codon optimized. Optionally, the multidomain therapeutic protein coding sequence encodes a multidomain therapeutic protein (or a multidomain therapeutic protein comprising a sequence) at least 90%, at least 91%, at least 92%, at least 93%, at least 94%, at least 95%, at least 96%, at least 97%, at least 98%, at least 99%, at least 99.5%, or 100% identical to SEQ ID NO: 691 (and, e.g., retaining the activity of native GAA). Optionally, the multidomain therapeutic protein coding sequence encodes a multidomain therapeutic protein (or a multidomain therapeutic protein comprising a sequence) at least 95%, at least 96%, at least 97%, at least 98%, at least 99%, at least 99.5%, or 100% identical to SEQ ID NO: 691 (and, e.g., retaining the activity of native GAA). Optionally, the multidomain therapeutic protein coding sequence in the above examples encodes a multidomain therapeutic protein (or a multidomain therapeutic protein comprising a sequence) at least 99%, at least 99.5%, or 100% identical to SEQ ID NO: 691 (and, e.g., retaining the activity of native GAA). Optionally, the multidomain therapeutic protein coding sequence in the above examples encodes a multidomain therapeutic protein comprising the sequence set forth in SEQ ID NO: 691. Optionally, the multidomain therapeutic protein coding sequence in the above examples encodes a multidomain therapeutic protein consisting essentially of the sequence set forth in SEQ ID NO: 691. Optionally, the multidomain therapeutic protein coding sequence in the above examples encodes a multidomain therapeutic protein consisting of the sequence set forth in SEQ ID NO: 691.

[0758] The nucleic acid construct can comprise, for example, (1) a 5′ ITR (e.g., such as the one set forth in SEQ ID NO: 283), (2) a splice acceptor site (e.g., a mouse Alb exon 2 splice acceptor, such as the one set forth in SEQ ID NO: 286), (3) the multidomain therapeutic protein coding sequence, (4) a polyadenylation signal (e.g., an SV40 polyadenylation signal, such as the one set forth in SEQ ID NO: 827), and (5) a 3′ ITR (e.g., such as the one set forth in SEQ ID NO: 283 or the reverse complement thereof). In one example, the nucleic acid construct comprises a sequence at least 90%, at least 91%, at least 92%, at least 93%, at least 94%, at least 95%, at least 96%, at least 97%, at least 98%, at least 99%, at least 99.5%, or 100% identical to SEQ ID NO: 850. In another example, the nucleic acid construct comprises a sequence at least 90%, at least 91%, at least 92%, at least 93%, at least 94%, at least 95%, at least 96%, at least 97%, at least 98%, at least 99%, at least 99.5%, or 100% identical to SEQ ID NO: 850 and encodes a multidomain therapeutic protein (or a multidomain therapeutic protein comprising a sequence) at least 99%, at least 99.5%, or 100% identical to SEQ ID NO: 691. In another example, the nucleic acid construct comprises a sequence at least 90%, at least 91%, at least 92%, at least 93%, at least 94%, at least 95%, at least 96%, at least 97%, at least 98%, at least 99%, at least 99.5%, or 100% identical to SEQ ID NO: 850 and encodes a multidomain therapeutic protein comprising the sequence set forth in SEQ ID NO: 691. In another example, the nucleic acid construct comprises a sequence at least 95%, at least 96%, at least 97%, at least 98%, at least 99%, at least 99.5%, or 100% identical to SEQ ID NO: 850. In another example, nucleic acid construct comprises a sequence at least 95%, at least 96%, at least 97%, at least 98%, at least 99%, at least 99.5%, or 100% identical to SEQ ID NO: 850 and encodes a multidomain therapeutic protein (or a multidomain therapeutic protein comprising a sequence) at least 99%, at least 99.5%, or 100% identical to SEQ ID NO: 691. In another example, the nucleic acid construct comprises a sequence at least 95%, at least 96%, at least 97%, at least 98%, at least 99%, at least 99.5%, or 100% identical to SEQ ID NO: 850 and encodes a multidomain therapeutic protein comprising the sequence set forth in SEQ ID NO: 691. In another example, the nucleic acid construct comprises a sequence at least 99%, at least 99.5%, or 100% identical to SEQ ID NO: 850. In another example, the nucleic acid construct comprises a sequence at least 99%, at least 99.5%, or 100% identical to SEQ ID NO: 850 and encodes a multidomain therapeutic protein (or a multidomain therapeutic protein comprising a sequence) at least 99%, at least 99.5%, or 100% identical to SEQ ID NO: 691. In another example, the nucleic acid construct comprises a sequence at least 99%, at least 99.5%, or 100% identical to SEQ ID NO: 850 and encodes a multidomain therapeutic protein comprising the sequence set forth in SEQ ID NO: 691. In another example, the nucleic acid construct comprises the sequence set forth in SEQ ID NO: 850. The multidomain therapeutic protein coding sequence can be, for example, CpG-depleted (e.g., fully CpG-depleted) and/or codon optimized. For example, the multidomain therapeutic protein coding sequence can be CpG depleted (e.g., fully CpG-depleted) and codon optimized. Optionally, the nucleic acid construct encodes a multidomain therapeutic protein (or a multidomain therapeutic protein comprising a sequence) at least 90%, at least 91%, at least 92%, at least 93%, at least 94%, at least 95%, at least 96%, at least 97%, at least 98%, at least 99%, at least 99.5%, or 100% identical to SEQ ID NO: 691 (and, e.g., retaining the activity of native GAA). Optionally, the nucleic acid construct encodes a multidomain therapeutic protein (or a multidomain therapeutic protein comprising a sequence) at least 95%, at least 96%, at least 97%, at least 98%, at least 99%, at least 99.5%, or 100% identical to SEQ ID NO: 691 (and, e.g., retaining the activity of native GAA). Optionally, the nucleic acid construct in the above examples encodes a multidomain therapeutic protein (or a multidomain therapeutic protein comprising a sequence) at least 99%, at least 99.5%, or 100% identical to SEQ ID NO: 691 (and, e.g., retaining the activity of native GAA). Optionally, the nucleic acid construct in the above examples encodes a multidomain therapeutic protein comprising the sequence set forth in SEQ ID NO: 691. Optionally, the nucleic acid construct in the above examples encodes a multidomain therapeutic protein consisting essentially of the sequence set forth in SEQ ID NO: 691. Optionally, the nucleic acid construct in the above examples encodes a multidomain therapeutic protein consisting of the sequence set forth in SEQ ID NO: 691.

[0759] Various multidomain therapeutic protein coding sequences are provided. In one example, the multidomain therapeutic protein coding sequence is (or comprises a sequence) at least 90%, at least 91%, at least 92%, at least 93%, at least 94%, at least 95%, at least 96%, at least 97%, at least 98%, at least 99%, at least 99.5%, or 100% identical to any one of SEQ ID NOS: 694 and 699-701. In another example, the multidomain therapeutic protein coding sequence is (or comprises a sequence) at least 95%, at least 96%, at least 97%, at least 98%, at least 99%, at least 99.5%, or 100% identical to any one of SEQ ID NOS: 694 and 699-701. In another example, the multidomain therapeutic protein coding sequence is (or comprises a sequence) at least 99%, at least 99.5%, or 100% identical to any one of SEQ ID NOS: 694 and 699-701. In another example, the multidomain therapeutic protein coding sequence comprises the sequence set forth in any one of SEQ ID NOS: 694 and 699-701. In another example, the multidomain therapeutic protein coding sequence consists essentially of the sequence set forth in any one of SEQ ID NOS: 694 and 699-701. In another example, the multidomain therapeutic protein coding sequence consists of the sequence set forth in any one of SEQ ID NOS: 694 and 699-701. Optionally, the multidomain therapeutic protein coding sequence encodes a multidomain therapeutic protein (or a multidomain therapeutic protein comprising a sequence) at least 90%, at least 91%, at least 92%, at least 93%, at least 94%, at least 95%, at least 96%, at least 97%, at least 98%, at least 99%, at least 99.5%, or 100% identical to SEQ ID NO: 690 (and, e.g., retaining the activity of native GAA). Optionally, the multidomain therapeutic protein coding sequence encodes a multidomain therapeutic protein (or a multidomain therapeutic protein comprising a sequence) at least 95%, at least 96%, at least 97%, at least 98%, at least 99%, at least 99.5%, or 100% identical to SEQ ID NO: 690 (and, e.g., retaining the activity of native GAA). Optionally, the multidomain therapeutic protein coding sequence in the above examples encodes a multidomain therapeutic protein (or a multidomain therapeutic protein comprising a sequence) at least 99%, at least 99.5%, or 100% identical to SEQ ID NO: 690 (and, e.g., retaining the activity of native GAA). Optionally, the multidomain therapeutic protein coding sequence in the above examples encodes a multidomain therapeutic protein comprising the sequence set forth in SEQ ID NO: 690. Optionally, the multidomain therapeutic protein coding sequence in the above examples encodes a multidomain therapeutic protein consisting essentially of the sequence set forth in SEQ ID NO: 690. Optionally, the multidomain therapeutic protein coding sequence in the above examples encodes a multidomain therapeutic protein consisting of the sequence set forth in SEQ ID NO: 690.

[0760] Various codon optimized multidomain therapeutic protein coding sequences are provided. The multidomain therapeutic protein coding sequence can be, for example, CpG-depleted (e.g., fully CpG depleted) and/or codon optimized (e.g., CpG depleted (e.g., fully CpG-depleted) and codon optimized). In one example, the multidomain therapeutic protein coding sequence is (or comprises a sequence) at least 90%, at least 91%, at least 92%, at least 93%, at least 94%, at least 95%, at least 96%, at least 97%, at least 98%, at least 99%, at least 99.5%, or 100% identical to any one of SEQ ID NOS: 699-701. In another example, the multidomain therapeutic protein coding sequence is (or comprises a sequence) at least 95%, at least 96%, at least 97%, at least 98%, at least 99%, at least 99.5%, or 100% identical to any one of SEQ ID NOS: 699-701. In another example, the multidomain therapeutic protein coding sequence is (or comprises a sequence) at least 99%, at least 99.5%, or 100% identical to any one of SEQ ID NOS: 699-701. In another example, the multidomain therapeutic protein coding sequence comprises the sequence set forth in any one of SEQ ID NOS: 699-701. In another example, the multidomain therapeutic protein coding sequence consists essentially of the sequence set forth in any one of SEQ ID NOS: 699-701. In another example, the multidomain therapeutic protein coding sequence consists of the sequence set forth in any one of SEQ ID NOS: 699-701. Optionally, the multidomain therapeutic protein coding sequence encodes a multidomain therapeutic protein (or a multidomain therapeutic protein comprising a sequence) at least 90%, at least 91%, at least 92%, at least 93%, at least 94%, at least 95%, at least 96%, at least 97%, at least 98%, at least 99%, at least 99.5%, or 100% identical to SEQ ID NO: 690 (and, e.g., retaining the activity of native GAA). Optionally, the multidomain therapeutic protein coding sequence encodes a multidomain therapeutic protein (or a multidomain therapeutic protein comprising a sequence) at least 95%, at least 96%, at least 97%, at least 98%, at least 99%, at least 99.5%, or 100% identical to SEQ ID NO: 690 (and, e.g., retaining the activity of native GAA). Optionally, the GAA coding sequence in the above examples encodes a multidomain therapeutic protein (or a multidomain therapeutic protein comprising a sequence) at least 99%, at least 99.5%, or 100% identical to SEQ ID NO: 690 (and, e.g., retaining the activity of native GAA). Optionally, the multidomain therapeutic protein coding sequence in the above examples encodes a multidomain therapeutic protein comprising the sequence set forth in SEQ ID NO: 690. Optionally, the multidomain therapeutic protein coding sequence in the above examples encodes a multidomain therapeutic protein consisting essentially of the sequence set forth in SEQ ID NO: 690. Optionally, the multidomain therapeutic protein coding sequence in the above examples encodes a multidomain therapeutic protein consisting of the sequence set forth in SEQ ID NO: 690.

[0761] In one example, the multidomain therapeutic protein coding sequence is (or comprises a sequence) at least 90%, at least 91%, at least 92%, at least 93%, at least 94%, at least 95%, at least 96%, at least 97%, at least 98%, at least 99%, at least 99.5%, or 100% identical to SEQ ID NO: 699. In another example, the multidomain therapeutic protein coding sequence is (or comprises a sequence) at least 90%, at least 91%, at least 92%, at least 93%, at least 94%, at least 95%, at least 96%, at least 97%, at least 98%, at least 99%, at least 99.5%, or 100% identical to SEQ ID NO: 699 and encodes a multidomain therapeutic protein (or a multidomain therapeutic protein comprising a sequence) at least 99%, at least 99.5%, or 100% identical to SEQ ID NO: 690. In another example, the multidomain therapeutic protein coding sequence is (or comprises a sequence) at least 90%, at least 91%, at least 92%, at least 93%, at least 94%, at least 95%, at least 96%, at least 97%, at least 98%, at least 99%, at least 99.5%, or 100% identical to SEQ ID NO: 699 and encodes a multidomain therapeutic protein comprising the sequence set forth in SEQ ID NO: 690. In another example, the multidomain therapeutic protein coding sequence is (or comprises a sequence) at least 95%, at least 96%, at least 97%, at least 98%, at least 99%, at least 99.5%, or 100% identical to SEQ ID NO: 699. In another example, the multidomain therapeutic protein coding sequence is (or comprises a sequence) at least 95%, at least 96%, at least 97%, at least 98%, at least 99%, at least 99.5%, or 100% identical to SEQ ID NO: 699 and encodes a multidomain therapeutic protein (or a multidomain therapeutic protein comprising a sequence) at least 99%, at least 99.5%, or 100% identical to SEQ ID NO: 690. In another example, the multidomain therapeutic protein coding sequence is (or comprises a sequence) at least 95%, at least 96%, at least 97%, at least 98%, at least 99%, at least 99.5%, or 100% identical to SEQ ID NO: 699 and encodes a multidomain therapeutic protein comprising the sequence set forth in SEQ ID NO: 690. In another example, the multidomain therapeutic protein coding sequence is (or comprises a sequence) at least 99%, at least 99.5%, or 100% identical to SEQ ID NO: 699. In another example, the multidomain therapeutic protein coding sequence is (or comprises a sequence) at least 99%, at least 99.5%, or 100% identical to SEQ ID NO: 699 and encodes a multidomain therapeutic protein (or a multidomain therapeutic protein comprising a sequence) at least 99%, at least 99.5%, or 100% identical to SEQ ID NO: 690. In another example, the multidomain therapeutic protein coding sequence is (or comprises a sequence) at least 99%, at least 99.5%, or 100% identical to SEQ ID NO: 699 and encodes a multidomain therapeutic protein comprising the sequence set forth in SEQ ID NO: 690. In another example, the multidomain therapeutic protein coding sequence comprises the sequence set forth in SEQ ID NO: 699. In another example, the multidomain therapeutic protein coding sequence consists essentially of the sequence set forth in SEQ ID NO: 699. In another example, the multidomain therapeutic protein coding sequence consists of the sequence set forth in SEQ ID NO: 699. The multidomain therapeutic protein coding sequence can be, for example, CpG-depleted (e.g., fully CpG-depleted) and/or codon optimized. For example, the multidomain therapeutic protein coding sequence can be CpG depleted (e.g., fully CpG-depleted) and codon optimized. Optionally, the multidomain therapeutic protein coding sequence encodes a multidomain therapeutic protein (or a multidomain therapeutic protein comprising a sequence) at least 90%, at least 91%, at least 92%, at least 93%, at least 94%, at least 95%, at least 96%, at least 97%, at least 98%, at least 99%, at least 99.5%, or 100% identical to SEQ ID NO: 690 (and, e.g., retaining the activity of native GAA). Optionally, the multidomain therapeutic protein coding sequence encodes a multidomain therapeutic protein (or a multidomain therapeutic protein comprising a sequence) at least 95%, at least 96%, at least 97%, at least 98%, at least 99%, at least 99.5%, or 100% identical to SEQ ID NO: 690 (and, e.g., retaining the activity of native GAA). Optionally, the multidomain therapeutic protein coding sequence in the above examples encodes a multidomain therapeutic protein (or a multidomain therapeutic protein comprising a sequence) at least 99%, at least 99.5%, or 100% identical to SEQ ID NO: 690 (and, e.g., retaining the activity of native GAA). Optionally, the multidomain therapeutic protein coding sequence in the above examples encodes a multidomain therapeutic protein comprising the sequence set forth in SEQ ID NO: 690. Optionally, the multidomain therapeutic protein coding sequence in the above examples encodes a multidomain therapeutic protein consisting essentially of the sequence set forth in SEQ ID NO: 690. Optionally, the multidomain therapeutic protein coding sequence in the above examples encodes a multidomain therapeutic protein consisting of the sequence set forth in SEQ ID NO: 690.

[0762] The nucleic acid construct can comprise, for example, (1) a 5′ ITR (e.g., such as the one set forth in SEQ ID NO: 283), (2) a splice acceptor site (e.g., a mouse Alb exon 2 splice acceptor, such as the one set forth in SEQ ID NO: 286), (3) the multidomain therapeutic protein coding sequence, (4) a polyadenylation signal (e.g., an SV40 polyadenylation signal, such as the one set forth in SEQ ID NO: 827), and (5) a 3′ ITR (e.g., such as the one set forth in SEQ ID NO: 283 or the reverse complement thereof). In one example, the nucleic acid construct comprises a sequence at least 90%, at least 91%, at least 92%, at least 93%, at least 94%, at least 95%, at least 96%, at least 97%, at least 98%, at least 99%, at least 99.5%, or 100% identical to SEQ ID NO: 844. In another example, the nucleic acid construct comprises a sequence at least 90%, at least 91%, at least 92%, at least 93%, at least 94%, at least 95%, at least 96%, at least 97%, at least 98%, at least 99%, at least 99.5%, or 100% identical to SEQ ID NO: 844 and encodes a multidomain therapeutic protein (or a multidomain therapeutic protein comprising a sequence) at least 99%, at least 99.5%, or 100% identical to SEQ ID NO: 690. In another example, the nucleic acid construct comprises a sequence at least 90%, at least 91%, at least 92%, at least 93%, at least 94%, at least 95%, at least 96%, at least 97%, at least 98%, at least 99%, at least 99.5%, or 100% identical to SEQ ID NO: 844 and encodes a multidomain therapeutic protein comprising the sequence set forth in SEQ ID NO: 690. In another example, the nucleic acid construct comprises a sequence at least 95%, at least 96%, at least 97%, at least 98%, at least 99%, at least 99.5%, or 100% identical to SEQ ID NO: 844. In another example, the nucleic acid construct comprises a sequence at least 95%, at least 96%, at least 97%, at least 98%, at least 99%, at least 99.5%, or 100% identical to SEQ ID NO: 844 and encodes a multidomain therapeutic protein (or a multidomain therapeutic protein comprising a sequence) at least 99%, at least 99.5%, or 100% identical to SEQ ID NO: 690. In another example, the nucleic acid construct comprises a sequence at least 95%, at least 96%, at least 97%, at least 98%, at least 99%, at least 99.5%, or 100% identical to SEQ ID NO: 844 and encodes a multidomain therapeutic protein comprising the sequence set forth in SEQ ID NO: 690. In another example, the nucleic acid construct comprises a sequence at least 99%, at least 99.5%, or 100% identical to SEQ ID NO: 844. In another example, the nucleic acid construct comprises a sequence at least 99%, at least 99.5%, or 100% identical to SEQ ID NO: 844 and encodes a multidomain therapeutic protein (or a multidomain therapeutic protein comprising a sequence) at least 99%, at least 99.5%, or 100% identical to SEQ ID NO: 690. In another example, the nucleic acid construct comprises a sequence at least 99%, at least 99.5%, or 100% identical to SEQ ID NO: 844 and encodes a multidomain therapeutic protein comprising the sequence set forth in SEQ ID NO: 690. In another example, the nucleic acid construct comprises the sequence set forth in SEQ ID NO: 844. The multidomain therapeutic protein coding sequence can be, for example, CpG-depleted (e.g., fully CpG-depleted) and/or codon optimized. For example, the multidomain therapeutic protein coding sequence can be CpG depleted (e.g., fully CpG-depleted) and codon optimized. Optionally, the nucleic acid construct encodes a multidomain therapeutic protein (or a multidomain therapeutic protein comprising a sequence) at least 90%, at least 91%, at least 92%, at least 93%, at least 94%, at least 95%, at least 96%, at least 97%, at least 98%, at least 99%, at least 99.5%, or 100% identical to SEQ ID NO: 690 (and, e.g., retaining the activity of native GAA). Optionally, the nucleic acid construct encodes a multidomain therapeutic protein (or a multidomain therapeutic protein comprising a sequence) at least 95%, at least 96%, at least 97%, at least 98%, at least 99%, at least 99.5%, or 100% identical to SEQ ID NO: 690 (and, e.g., retaining the activity of native GAA). Optionally, the nucleic acid construct in the above examples encodes a multidomain therapeutic protein (or a multidomain therapeutic protein comprising a sequence) at least 99%, at least 99.5%, or 100% identical to SEQ ID NO: 690 (and, e.g., retaining the activity of native GAA). Optionally, the nucleic acid construct in the above examples encodes a multidomain therapeutic protein comprising the sequence set forth in SEQ ID NO: 690. Optionally, the nucleic acid construct in the above examples encodes a multidomain therapeutic protein consisting essentially of the sequence set forth in SEQ ID NO: 690. Optionally, the nucleic acid construct in the above examples encodes a multidomain therapeutic protein consisting of the sequence set forth in SEQ ID NO: 690.

[0763] In one example, the multidomain therapeutic protein coding sequence is (or comprises a sequence) at least 90%, at least 91%, at least 92%, at least 93%, at least 94%, at least 95%, at least 96%, at least 97%, at least 98%, at least 99%, at least 99.5%, or 100% identical to SEQ ID NO: 700. In another example, the multidomain therapeutic protein coding sequence is (or comprises a sequence) at least 90%, at least 91%, at least 92%, at least 93%, at least 94%, at least 95%, at least 96%, at least 97%, at least 98%, at least 99%, at least 99.5%, or 100% identical to SEQ ID NO: 700 and encodes a multidomain therapeutic protein (or a multidomain therapeutic protein comprising a sequence) at least 99%, at least 99.5%, or 100% identical to SEQ ID NO: 690. In another example, the multidomain therapeutic protein coding sequence is (or comprises a sequence) at least 90%, at least 91%, at least 92%, at least 93%, at least 94%, at least 95%, at least 96%, at least 97%, at least 98%, at least 99%, at least 99.5%, or 100% identical to SEQ ID NO: 700 and encodes a multidomain therapeutic protein comprising the sequence set forth in SEQ ID NO: 690. In another example, the multidomain therapeutic protein coding sequence is (or comprises a sequence) at least 95%, at least 96%, at least 97%, at least 98%, at least 99%, at least 99.5%, or 100% identical to SEQ ID NO: 700. In another example, the multidomain therapeutic protein coding sequence is (or comprises a sequence) at least 95%, at least 96%, at least 97%, at least 98%, at least 99%, at least 99.5%, or 100% identical to SEQ ID NO: 700 and encodes a multidomain therapeutic protein (or a multidomain therapeutic protein comprising a sequence) at least 99%, at least 99.5%, or 100% identical to SEQ ID NO: 690. In another example, the multidomain therapeutic protein coding sequence is (or comprises a sequence) at least 95%, at least 96%, at least 97%, at least 98%, at least 99%, at least 99.5%, or 100% identical to SEQ ID NO: 700 and encodes a multidomain therapeutic protein comprising the sequence set forth in SEQ ID NO: 690. In another example, the multidomain therapeutic protein coding sequence is (or comprises a sequence) at least 99%, at least 99.5%, or 100% identical to SEQ ID NO: 700. In another example, the multidomain therapeutic protein coding sequence is (or comprises a sequence) at least 99%, at least 99.5%, or 100% identical to SEQ ID NO: 700 and encodes a multidomain therapeutic protein (or a multidomain therapeutic protein comprising a sequence) at least 99%, at least 99.5%, or 100% identical to SEQ ID NO: 690. In another example, the multidomain therapeutic protein coding sequence is (or comprises a sequence) at least 99%, at least 99.5%, or 100% identical to SEQ ID NO: 700 and encodes a multidomain therapeutic protein comprising the sequence set forth in SEQ ID NO: 690. In another example, the multidomain therapeutic protein coding sequence comprises the sequence set forth in SEQ ID NO: 700. In another example, the multidomain therapeutic protein coding sequence consists essentially of the sequence set forth in SEQ ID NO: 700. In another example, the multidomain therapeutic protein coding sequence consists of the sequence set forth in SEQ ID NO: 700. The multidomain therapeutic protein coding sequence can be, for example, CpG-depleted (e.g., fully CpG-depleted) and/or codon optimized. For example, the multidomain therapeutic protein coding sequence can be CpG depleted (e.g., fully CpG-depleted) and codon optimized. Optionally, the multidomain therapeutic protein coding sequence encodes a multidomain therapeutic protein (or a multidomain therapeutic protein comprising a sequence) at least 90%, at least 91%, at least 92%, at least 93%, at least 94%, at least 95%, at least 96%, at least 97%, at least 98%, at least 99%, at least 99.5%, or 100% identical to SEQ ID NO: 690 (and, e.g., retaining the activity of native GAA). Optionally, the multidomain therapeutic protein coding sequence encodes a multidomain therapeutic protein (or a multidomain therapeutic protein comprising a sequence) at least 95%, at least 96%, at least 97%, at least 98%, at least 99%, at least 99.5%, or 100% identical to SEQ ID NO: 690 (and, e.g., retaining the activity of native GAA). Optionally, the multidomain therapeutic protein coding sequence in the above examples encodes a multidomain therapeutic protein (or a multidomain therapeutic protein comprising a sequence) at least 99%, at least 99.5%, or 100% identical to SEQ ID NO: 690 (and, e.g., retaining the activity of native GAA). Optionally, the multidomain therapeutic protein coding sequence in the above examples encodes a multidomain therapeutic protein comprising the sequence set forth in SEQ ID NO: 690. Optionally, the multidomain therapeutic protein coding sequence in the above examples encodes a multidomain therapeutic protein consisting essentially of the sequence set forth in SEQ ID NO: 690. Optionally, the multidomain therapeutic protein coding sequence in the above examples encodes a multidomain therapeutic protein consisting of the sequence set forth in SEQ ID NO: 690.

[0764] The nucleic acid construct can comprise, for example, (1) a 5′ ITR (e.g., such as the one set forth in SEQ ID NO: 283), (2) a splice acceptor site (e.g., a mouse Alb exon 2 splice acceptor, such as the one set forth in SEQ ID NO: 286), (3) the multidomain therapeutic protein coding sequence, (4) a polyadenylation signal (e.g., an SV40 polyadenylation signal, such as the one set forth in SEQ ID NO: 827), and (5) a 3′ ITR (e.g., such as the one set forth in SEQ ID NO: 283 or the reverse complement thereof). In one example, the nucleic acid construct comprises a sequence at least 90%, at least 91%, at least 92%, at least 93%, at least 94%, at least 95%, at least 96%, at least 97%, at least 98%, at least 99%, at least 99.5%, or 100% identical to SEQ ID NO: 845. In another example, the nucleic acid construct comprises a sequence at least 90%, at least 91%, at least 92%, at least 93%, at least 94%, at least 95%, at least 96%, at least 97%, at least 98%, at least 99%, at least 99.5%, or 100% identical to SEQ ID NO: 845 and encodes a multidomain therapeutic protein (or a multidomain therapeutic protein comprising a sequence) at least 99%, at least 99.5%, or 100% identical to SEQ ID NO: 690. In another example, the nucleic acid construct comprises a sequence at least 90%, at least 91%, at least 92%, at least 93%, at least 94%, at least 95%, at least 96%, at least 97%, at least 98%, at least 99%, at least 99.5%, or 100% identical to SEQ ID NO: 845 and encodes a multidomain therapeutic protein comprising the sequence set forth in SEQ ID NO: 690. In another example, the nucleic acid construct comprises a sequence at least 95%, at least 96%, at least 97%, at least 98%, at least 99%, at least 99.5%, or 100% identical to SEQ ID NO: 845. In another example, the nucleic acid construct comprises a sequence at least 95%, at least 96%, at least 97%, at least 98%, at least 99%, at least 99.5%, or 100% identical to SEQ ID NO: 845 and encodes a multidomain therapeutic protein (or a multidomain therapeutic protein comprising a sequence) at least 99%, at least 99.5%, or 100% identical to SEQ ID NO: 690. In another example, the nucleic acid construct comprises a sequence at least 95%, at least 96%, at least 97%, at least 98%, at least 99%, at least 99.5%, or 100% identical to SEQ ID NO: 845 and encodes a multidomain therapeutic protein comprising the sequence set forth in SEQ ID NO: 690. In another example, the nucleic acid construct comprises a sequence at least 99%, at least 99.5%, or 100% identical to SEQ ID NO: 845. In another example, the nucleic acid construct comprises a sequence at least 99%, at least 99.5%, or 100% identical to SEQ ID NO: 845 and encodes a multidomain therapeutic protein (or a multidomain therapeutic protein comprising a sequence) at least 99%, at least 99.5%, or 100% identical to SEQ ID NO: 690. In another example, the nucleic acid construct comprises a sequence at least 99%, at least 99.5%, or 100% identical to SEQ ID NO: 845 and encodes a multidomain therapeutic protein comprising the sequence set forth in SEQ ID NO: 690. In another example, the nucleic acid construct comprises the sequence set forth in SEQ ID NO: 845. The multidomain therapeutic protein coding sequence can be, for example, CpG-depleted (e.g., fully CpG-depleted) and/or codon optimized. For example, the multidomain therapeutic protein coding sequence can be CpG depleted (e.g., fully CpG-depleted) and codon optimized. Optionally, the nucleic acid construct encodes a multidomain therapeutic protein (or a multidomain therapeutic protein comprising a sequence) at least 90%, at least 91%, at least 92%, at least 93%, at least 94%, at least 95%, at least 96%, at least 97%, at least 98%, at least 99%, at least 99.5%, or 100% identical to SEQ ID NO: 690 (and, e.g., retaining the activity of native GAA). Optionally, the nucleic acid construct encodes a multidomain therapeutic protein (or a multidomain therapeutic protein comprising a sequence) at least 95%, at least 96%, at least 97%, at least 98%, at least 99%, at least 99.5%, or 100% identical to SEQ ID NO: 690 (and, e.g., retaining the activity of native GAA). Optionally, the nucleic acid construct in the above examples encodes a multidomain therapeutic protein (or a multidomain therapeutic protein comprising a sequence) at least 99%, at least 99.5%, or 100% identical to SEQ ID NO: 690 (and, e.g., retaining the activity of native GAA). Optionally, the nucleic acid construct in the above examples encodes a multidomain therapeutic protein comprising the sequence set forth in SEQ ID NO: 690. Optionally, the nucleic acid construct in the above examples encodes a multidomain therapeutic protein consisting essentially of the sequence set forth in SEQ ID NO: 690. Optionally, the nucleic acid construct in the above examples encodes a multidomain therapeutic protein consisting of the sequence set forth in SEQ ID NO: 690.

[0765] In one example, the multidomain therapeutic protein coding sequence is (or comprises a sequence) at least 90%, at least 91%, at least 92%, at least 93%, at least 94%, at least 95%, at least 96%, at least 97%, at least 98%, at least 99%, at least 99.5%, or 100% identical to SEQ ID NO: 701. In another example, the multidomain therapeutic protein coding sequence is (or comprises a sequence) at least 90%, at least 91%, at least 92%, at least 93%, at least 94%, at least 95%, at least 96%, at least 97%, at least 98%, at least 99%, at least 99.5%, or 100% identical to SEQ ID NO: 701 and encodes a multidomain therapeutic protein (or a multidomain therapeutic protein comprising a sequence) at least 99%, at least 99.5%, or 100% identical to SEQ ID NO: 690. In another example, the multidomain therapeutic protein coding sequence is (or comprises a sequence) at least 90%, at least 91%, at least 92%, at least 93%, at least 94%, at least 95%, at least 96%, at least 97%, at least 98%, at least 99%, at least 99.5%, or 100% identical to SEQ ID NO: 701 and encodes a multidomain therapeutic protein comprising the sequence set forth in SEQ ID NO: 690. In another example, the multidomain therapeutic protein coding sequence is (or comprises a sequence) at least 95%, at least 96%, at least 97%, at least 98%, at least 99%, at least 99.5%, or 100% identical to SEQ ID NO: 701. In another example, the multidomain therapeutic protein coding sequence is (or comprises a sequence) at least 95%, at least 96%, at least 97%, at least 98%, at least 99%, at least 99.5%, or 100% identical to SEQ ID NO: 701 and encodes a multidomain therapeutic protein (or a multidomain therapeutic protein comprising a sequence) at least 99%, at least 99.5%, or 100% identical to SEQ ID NO: 690. In another example, the multidomain therapeutic protein coding sequence is (or comprises a sequence) at least 95%, at least 96%, at least 97%, at least 98%, at least 99%, at least 99.5%, or 100% identical to SEQ ID NO: 701 and encodes a multidomain therapeutic protein comprising the sequence set forth in SEQ ID NO: 690. In another example, the multidomain therapeutic protein coding sequence is (or comprises a sequence) at least 99%, at least 99.5%, or 100% identical to SEQ ID NO: 701. In another example, the multidomain therapeutic protein coding sequence is (or comprises a sequence) at least 99%, at least 99.5%, or 100% identical to SEQ ID NO: 701 and encodes a multidomain therapeutic protein (or a multidomain therapeutic protein comprising a sequence) at least 99%, at least 99.5%, or 100% identical to SEQ ID NO: 690. In another example, the multidomain therapeutic protein coding sequence is (or comprises a sequence) at least 99%, at least 99.5%, or 100% identical to SEQ ID NO: 701 and encodes a multidomain therapeutic protein comprising the sequence set forth in SEQ ID NO: 690. In another example, the multidomain therapeutic protein coding sequence comprises the sequence set forth in SEQ ID NO: 701. In another example, the multidomain therapeutic protein coding sequence consists essentially of the sequence set forth in SEQ ID NO: 701. In another example, the multidomain therapeutic protein coding sequence consists of the sequence set forth in SEQ ID NO: 701. The multidomain therapeutic protein coding sequence can be, for example, CpG-depleted (e.g., fully CpG-depleted) and/or codon optimized. For example, the multidomain therapeutic protein coding sequence can be CpG depleted (e.g., fully CpG-depleted) and codon optimized. Optionally, the multidomain therapeutic protein coding sequence encodes a multidomain therapeutic protein (or a multidomain therapeutic protein comprising a sequence) at least 90%, at least 91%, at least 92%, at least 93%, at least 94%, at least 95%, at least 96%, at least 97%, at least 98%, at least 99%, at least 99.5%, or 100% identical to SEQ ID NO: 690 (and, e.g., retaining the activity of native GAA). Optionally, the multidomain therapeutic protein coding sequence encodes a multidomain therapeutic protein (or a multidomain therapeutic protein comprising a sequence) at least 95%, at least 96%, at least 97%, at least 98%, at least 99%, at least 99.5%, or 100% identical to SEQ ID NO: 690 (and, e.g., retaining the activity of native GAA). Optionally, the multidomain therapeutic protein coding sequence in the above examples encodes a multidomain therapeutic protein (or a multidomain therapeutic protein comprising a sequence) at least 99%, at least 99.5%, or 100% identical to SEQ ID NO: 690 (and, e.g., retaining the activity of native GAA). Optionally, the multidomain therapeutic protein coding sequence in the above examples encodes a multidomain therapeutic protein comprising the sequence set forth in SEQ ID NO: 690. Optionally, the multidomain therapeutic protein coding sequence in the above examples encodes a multidomain therapeutic protein consisting essentially of the sequence set forth in SEQ ID NO: 690. Optionally, the multidomain therapeutic protein coding sequence in the above examples encodes a multidomain therapeutic protein consisting of the sequence set forth in SEQ ID NO: 690.

[0766] The nucleic acid construct can comprise, for example, (1) a 5′ ITR (e.g., such as the one set forth in SEQ ID NO: 283), (2) a splice acceptor site (e.g., a mouse Alb exon 2 splice acceptor, such as the one set forth in SEQ ID NO: 286), (3) the multidomain therapeutic protein coding sequence, (4) a polyadenylation signal (e.g., an SV40 polyadenylation signal, such as the one set forth in SEQ ID NO: 827), and (5) a 3′ ITR (e.g., such as the one set forth in SEQ ID NO: 283 or the reverse complement thereof). In one example, the nucleic acid construct comprises a sequence at least 90%, at least 91%, at least 92%, at least 93%, at least 94%, at least 95%, at least 96%, at least 97%, at least 98%, at least 99%, at least 99.5%, or 100% identical to SEQ ID NO: 846. In another example, the nucleic acid construct comprises a sequence at least 90%, at least 91%, at least 92%, at least 93%, at least 94%, at least 95%, at least 96%, at least 97%, at least 98%, at least 99%, at least 99.5%, or 100% identical to SEQ ID NO: 846 and encodes a multidomain therapeutic protein (or a multidomain therapeutic protein comprising a sequence) at least 99%, at least 99.5%, or 100% identical to SEQ ID NO: 690. In another example, the nucleic acid construct comprises a sequence at least 90%, at least 91%, at least 92%, at least 93%, at least 94%, at least 95%, at least 96%, at least 97%, at least 98%, at least 99%, at least 99.5%, or 100% identical to SEQ ID NO: 846 and encodes a multidomain therapeutic protein comprising the sequence set forth in SEQ ID NO: 690. In another example, the nucleic acid construct comprises a sequence at least 95%, at least 96%, at least 97%, at least 98%, at least 99%, at least 99.5%, or 100% identical to SEQ ID NO: 846. In another example, the nucleic acid construct comprises a sequence at least 95%, at least 96%, at least 97%, at least 98%, at least 99%, at least 99.5%, or 100% identical to SEQ ID NO: 846 and encodes a multidomain therapeutic protein (or a multidomain therapeutic protein comprising a sequence) at least 99%, at least 99.5%, or 100% identical to SEQ ID NO: 690. In another example, the nucleic acid construct comprises a sequence at least 95%, at least 96%, at least 97%, at least 98%, at least 99%, at least 99.5%, or 100% identical to SEQ ID NO: 846 and encodes a multidomain therapeutic protein comprising the sequence set forth in SEQ ID NO: 690. In another example, the nucleic acid construct comprises a sequence at least 99%, at least 99.5%, or 100% identical to SEQ ID NO: 846. In another example, the nucleic acid construct comprises a sequence at least 99%, at least 99.5%, or 100% identical to SEQ ID NO: 846 and encodes a multidomain therapeutic protein (or a multidomain therapeutic protein comprising a sequence) at least 99%, at least 99.5%, or 100% identical to SEQ ID NO: 690. In another example, the nucleic acid construct comprises a sequence at least 99%, at least 99.5%, or 100% identical to SEQ ID NO: 846 and encodes a multidomain therapeutic protein comprising the sequence set forth in SEQ ID NO: 690. In another example, the nucleic acid construct comprises the sequence set forth in SEQ ID NO: 846. The multidomain therapeutic protein coding sequence can be, for example, CpG-depleted (e.g., fully CpG-depleted) and/or codon optimized. For example, the multidomain therapeutic protein coding sequence can be CpG depleted (e.g., fully CpG-depleted) and codon optimized. Optionally, the nucleic acid construct encodes a multidomain therapeutic protein (or a multidomain therapeutic protein comprising a sequence) at least 90%, at least 91%, at least 92%, at least 93%, at least 94%, at least 95%, at least 96%, at least 97%, at least 98%, at least 99%, at least 99.5%, or 100% identical to SEQ ID NO: 690 (and, e.g., retaining the activity of native GAA). Optionally, the nucleic acid construct encodes a multidomain therapeutic protein (or a multidomain therapeutic protein comprising a sequence) at least 95%, at least 96%, at least 97%, at least 98%, at least 99%, at least 99.5%, or 100% identical to SEQ ID NO: 690 (and, e.g., retaining the activity of native GAA). Optionally, the nucleic acid construct in the above examples encodes a multidomain therapeutic protein (or a multidomain therapeutic protein comprising a sequence) at least 99%, at least 99.5%, or 100% identical to SEQ ID NO: 690 (and, e.g., retaining the activity of native GAA). Optionally, the nucleic acid construct in the above examples encodes a multidomain therapeutic protein comprising the sequence set forth in SEQ ID NO: 690. Optionally, the nucleic acid construct in the above examples encodes a multidomain therapeutic protein consisting essentially of the sequence set forth in SEQ ID NO: 690. Optionally, the nucleic acid construct in the above examples encodes a multidomain therapeutic protein consisting of the sequence set forth in SEQ ID NO: 690.

[0767] Various multidomain therapeutic protein coding sequences are provided. In one example, the multidomain therapeutic protein coding sequence is (or comprises a sequence) at least 90%, at least 91%, at least 92%, at least 93%, at least 94%, at least 95%, at least 96%, at least 97%, at least 98%, at least 99%, at least 99.5%, or 100% identical to any one of SEQ ID NOS: 692 and 696-698. In another example, the multidomain therapeutic protein coding sequence is (or comprises a sequence) at least 95%, at least 96%, at least 97%, at least 98%, at least 99%, at least 99.5%, or 100% identical to any one of SEQ ID NOS: 692 and 696-698. In another example, the multidomain therapeutic protein coding sequence is (or comprises a sequence) at least 99%, at least 99.5%, or 100% identical to any one of SEQ ID NOS: 692 and 696-698. In another example, the multidomain therapeutic protein coding sequence comprises the sequence set forth in any one of SEQ ID NOS: 692 and 696-698. In another example, the multidomain therapeutic protein coding sequence consists essentially of the sequence set forth in any one of SEQ ID NOS: 692 and 696-698. In another example, the multidomain therapeutic protein coding sequence consists of the sequence set forth in any one of SEQ ID NOS: 692 and 696-698. Optionally, the multidomain therapeutic protein coding sequence encodes a multidomain therapeutic protein (or a multidomain therapeutic protein comprising a sequence) at least 90%, at least 91%, at least 92%, at least 93%, at least 94%, at least 95%, at least 96%, at least 97%, at least 98%, at least 99%, at least 99.5%, or 100% identical to SEQ ID NO: 688 (and, e.g., retaining the activity of native GAA). Optionally, the multidomain therapeutic protein coding sequence encodes a multidomain therapeutic protein (or a multidomain therapeutic protein comprising a sequence) at least 95%, at least 96%, at least 97%, at least 98%, at least 99%, at least 99.5%, or 100% identical to SEQ ID NO: 688 (and, e.g., retaining the activity of native GAA). Optionally, the multidomain therapeutic protein coding sequence in the above examples encodes a multidomain therapeutic protein (or a multidomain therapeutic protein comprising a sequence) at least 99%, at least 99.5%, or 100% identical to SEQ ID NO: 688 (and, e.g., retaining the activity of native GAA). Optionally, the multidomain therapeutic protein coding sequence in the above examples encodes a multidomain therapeutic protein comprising the sequence set forth in SEQ ID NO: 688. Optionally, the multidomain therapeutic protein coding sequence in the above examples encodes a multidomain therapeutic protein consisting essentially of the sequence set forth in SEQ ID NO: 688. Optionally, the multidomain therapeutic protein coding sequence in the above examples encodes a multidomain therapeutic protein consisting of the sequence set forth in SEQ ID NO: 688.

[0768] Various codon optimized multidomain therapeutic protein coding sequences are provided. The multidomain therapeutic protein coding sequence can be, for example, CpG-depleted (e.g., fully CpG depleted) and/or codon optimized (e.g., CpG depleted (e.g., fully CpG-depleted) and codon optimized). In one example, the multidomain therapeutic protein coding sequence is (or comprises a sequence) at least 90%, at least 91%, at least 92%, at least 93%, at least 94%, at least 95%, at least 96%, at least 97%, at least 98%, at least 99%, at least 99.5%, or 100% identical to any one of SEQ ID NOS: 696-698. In another example, the multidomain therapeutic protein coding sequence is (or comprises a sequence) at least 95%, at least 96%, at least 97%, at least 98%, at least 99%, at least 99.5%, or 100% identical to any one of SEQ ID NOS: 696-698. In another example, the multidomain therapeutic protein coding sequence is (or comprises a sequence) at least 99%, at least 99.5%, or 100% identical to any one of SEQ ID NOS: 696-698. In another example, the multidomain therapeutic protein coding sequence comprises the sequence set forth in any one of SEQ ID NOS: 696-698. In another example, the multidomain therapeutic protein coding sequence consists essentially of the sequence set forth in any one of SEQ ID NOS: 696-698. In another example, the multidomain therapeutic protein coding sequence consists of the sequence set forth in any one of SEQ ID NOS: 696-698. Optionally, the multidomain therapeutic protein coding sequence encodes a multidomain therapeutic protein (or a multidomain therapeutic protein comprising a sequence) at least 90%, at least 91%, at least 92%, at least 93%, at least 94%, at least 95%, at least 96%, at least 97%, at least 98%, at least 99%, at least 99.5%, or 100% identical to SEQ ID NO: 688 (and, e.g., retaining the activity of native GAA). Optionally, the multidomain therapeutic protein coding sequence encodes a multidomain therapeutic protein (or a multidomain therapeutic protein comprising a sequence) at least 95%, at least 96%, at least 97%, at least 98%, at least 99%, at least 99.5%, or 100% identical to SEQ ID NO: 688 (and, e.g., retaining the activity of native GAA). Optionally, the GAA coding sequence in the above examples encodes a multidomain therapeutic protein (or a multidomain therapeutic protein comprising a sequence) at least 99%, at least 99.5%, or 100% identical to SEQ ID NO: 688 (and, e.g., retaining the activity of native GAA). Optionally, the multidomain therapeutic protein coding sequence in the above examples encodes a multidomain therapeutic protein comprising the sequence set forth in SEQ ID NO: 688. Optionally, the multidomain therapeutic protein coding sequence in the above examples encodes a multidomain therapeutic protein consisting essentially of the sequence set forth in SEQ ID NO: 688. Optionally, the multidomain therapeutic protein coding sequence in the above examples encodes a multidomain therapeutic protein consisting of the sequence set forth in SEQ ID NO: 688.

[0769] Various multidomain therapeutic protein coding sequences are provided. In one example, the multidomain therapeutic protein coding sequence is (or comprises a sequence) at least 90%, at least 91%, at least 92%, at least 93%, at least 94%, at least 95%, at least 96%, at least 97%, at least 98%, at least 99%, at least 99.5%, or 100% identical to SEQ ID NO: 693. In another example, the multidomain therapeutic protein coding sequence is (or comprises a sequence) at least 95%, at least 96%, at least 97%, at least 98%, at least 99%, at least 99.5%, or 100% identical to SEQ ID NO: 693. In another example, the multidomain therapeutic protein coding sequence is (or comprises a sequence) at least 99%, at least 99.5%, or 100% identical to SEQ ID NO: 693. In another example, the multidomain therapeutic protein coding sequence comprises the sequence set forth in SEQ ID NO: 693. In another example, the multidomain therapeutic protein coding sequence consists essentially of the sequence set forth in SEQ ID NO: 693. In another example, the multidomain therapeutic protein coding sequence consists of the sequence set forth in SEQ ID NO: 693. Optionally, the multidomain therapeutic protein coding sequence encodes a multidomain therapeutic protein (or a multidomain therapeutic protein comprising a sequence) at least 90%, at least 91%, at least 92%, at least 93%, at least 94%, at least 95%, at least 96%, at least 97%, at least 98%, at least 99%, at least 99.5%, or 100% identical to SEQ ID NO: 689 (and, e.g., retaining the activity of native GAA). Optionally, the multidomain therapeutic protein coding sequence encodes a multidomain therapeutic protein (or a multidomain therapeutic protein comprising a sequence) at least 95%, at least 96%, at least 97%, at least 98%, at least 99%, at least 99.5%, or 100% identical to SEQ ID NO: 689 (and, e.g., retaining the activity of native GAA). Optionally, the multidomain therapeutic protein coding sequence in the above examples encodes a multidomain therapeutic protein (or a multidomain therapeutic protein comprising a sequence) at least 99%, at least 99.5%, or 100% identical to SEQ ID NO: 689 (and, e.g., retaining the activity of native GAA). Optionally, the multidomain therapeutic protein coding sequence in the above examples encodes a multidomain therapeutic protein comprising the sequence set forth in SEQ ID NO: 689. Optionally, the multidomain therapeutic protein coding sequence in the above examples encodes a multidomain therapeutic protein consisting essentially of the sequence set forth in SEQ ID NO: 689. Optionally, the multidomain therapeutic protein coding sequence in the above examples encodes a multidomain therapeutic protein consisting of the sequence set forth in SEQ ID NO: 689.

[0770] When specific multidomain therapeutic protein nucleic acid constructs sequences are disclosed herein, they are meant to encompass the sequence disclosed or the reverse complement of the sequence. For example, if a multidomain therapeutic protein nucleic acid construct disclosed herein consists of the hypothetical sequence 5′-CTGGACCGA-3′, it is also meant to encompass the reverse complement of that sequence (5′-TCGGTCCAG-3′). Likewise, when construct elements are disclosed herein in a specific 5′ to 3′ order, they are also meant to encompass the reverse complement of the order of those elements. One reason for this is that, in many embodiments disclosed herein, the multidomain therapeutic protein nucleic acid constructs are part of a single-stranded recombinant AAV vector. Single-stranded AAV genomes are packaged as either sense (plus-stranded) or anti-sense (minus-stranded genomes), and single-stranded AAV genomes of + and − polarity are packaged with equal frequency into mature rAAV virions. See, e.g., LING et al. (2015) J. Mol. Genet. Med. 9(3):175, Zhou et al. (2008) Mol. Ther. 16(3):494-499, and Samulski et al. (1987) J. Virol. 61:3096-3101, each of which is herein incorporated by reference in its entirety for all purposes.

### (9) Vectors

[0771] The nucleic acid constructs disclosed herein can be provided in a vector for expression or for integration into and expression from a target genomic locus. A vector can comprise additional sequences such as, for example, replication origins, promoters, and genes encoding antibiotic resistance. A vector can also comprise nuclease agent components as disclosed elsewhere herein. For example, a vector can comprise a nucleic acid construct encoding a polypeptide of interest, a CRISPR/Cas system (nucleic acids encoding Cas protein and gRNA), one or more components of a CRISPR/Cas system, or a combination thereof (e.g., a nucleic acid construct and a gRNA). In some cases, a vector comprising a nucleic acid construct encoding a polypeptide of interest does not comprise any components of the nuclease agents described herein (e.g., does not comprise a nucleic acid encoding a Cas protein and does not comprise a nucleic acid encoding a gRNA). Some such vectors comprise homology arms corresponding to target sites in the target genomic locus. Other such vectors do not comprise any homology arms.

[0772] Some vectors may be circular. Alternatively, the vector may be linear. The vector can be packaged for delivered via a lipid nanoparticle, liposome, non-lipid nanoparticle, or viral capsid. Non-limiting exemplary vectors include plasmids, phagemids, cosmids, artificial chromosomes, minichromosomes, transposons, viral vectors, and expression vectors.

[0773] The vectors can be, for example, viral vectors such as adeno-associated virus (AAV) vectors. The AAV may be any suitable serotype and may be a single-stranded AAV (ssAAV) or a self-complementary AAV (scAAV). Other exemplary viruses/viral vectors include retroviruses, lentiviruses, adenoviruses, vaccinia viruses, poxviruses, and herpes simplex viruses. The viruses can infect dividing cells, non-dividing cells, or both dividing and non-dividing cells. The viruses can integrate into the host genome or alternatively do not integrate into the host genome. Such viruses can also be engineered to have reduced immunity. The viruses can be replication-competent or can be replication-defective (e.g., defective in one or more genes necessary for additional rounds of virion replication and/or packaging). Viruses can cause transient expression or longer-lasting expression. Viral vector may be genetically modified from their wild type counterparts. For example, the viral vector may comprise an insertion, deletion, or substitution of one or more nucleotides to facilitate cloning or such that one or more properties of the vector is changed. Such properties may include packaging capacity, transduction efficiency, immunogenicity, genome integration, replication, transcription, and translation. In some examples, a portion of the viral genome may be deleted such that the virus is capable of packaging exogenous sequences having a larger size. In some examples, the viral vector may have an enhanced transduction efficiency. In some examples, the immune response induced by the virus in a host may be reduced. In some examples, viral genes (such as integrase) that promote integration of the viral sequence into a host genome may be mutated such that the virus becomes non-integrating. In some examples, the viral vector may be replication defective. In some examples, the viral vector may comprise exogenous transcriptional or translational control sequences to drive expression of coding sequences on the vector. In some examples, the virus may be helper-dependent. For example, the virus may need one or more helper virus to supply viral components (such as viral proteins) required to amplify and package the vectors into viral particles. In such a case, one or more helper components, including one or more vectors encoding the viral components, may be introduced into a host cell or population of host cells along with the vector system described herein. In other examples, the virus may be helper-free. For example, the virus may be capable of amplifying and packaging the vectors without a helper virus. In some examples, the vector system described herein may also encode the viral components required for virus amplification and packaging.

[0774] Exemplary viral titers (e.g., AAV titers) include 10¹², 10¹³, 10¹⁴, 10¹¹, and 10¹⁶ vector genomes/mL. Exemplary viral titers (e.g., AAV titers) include about 10¹², about 10¹³, about 10¹⁴, about 10¹⁵, and about 10¹⁶ vector genomes (vg)/mL, or between about 10¹² to about 10¹⁶, between about 10¹² to about 10¹⁵, between about 10¹² to about 10¹⁴, between about 10¹² to about 10¹³, between about 10¹³ to about 10¹⁶, between about 10¹⁴ to about 10¹⁶, between about 10¹⁵ to about 10¹⁶, or between about 10¹³ to about 10¹³ vg/mL. Other exemplary viral titers (e.g., AAV titers) include about 10¹², about 10¹³, about 10¹⁴, about 10¹⁵, and about 10¹⁶ vector genomes (vg)/kg of body weight, or between about 10¹² to about 10¹⁶, between about 10¹² to about 10¹³, between about 10¹² to about 10¹⁴, between about 10¹² to about 10¹³, between about 10¹³ to about 10¹⁶, between about 10¹⁴ to about 10¹⁶, between about 10¹³ to about 10¹⁶, or between about 10¹³ to about 10¹³ vg/kg of body weight. In one example, the viral titer is between about 10¹³ to about 10¹⁴ vg/mL or vg/kg. In another example, the viral titer is between about 10¹² to about 10¹³ vg/mL or vg/kg (e.g., between about 10¹² to about 10¹³ vg/kg). In another example, the viral titer is between about 10¹² to about 10¹⁴ vg/mL or vg/kg (e.g., between about 10¹² to about 10¹⁴ vg/kg). For example, the viral titer can be between about 1.5E12 to about 1.5E13 vg/kg, can be about 1.5E12 vg/kg, or can be about 1.5E13 vg/kg. In another example, the viral titer is about 2E13 vg/mL or vg/kg. In another example, the viral titer is about 1E12 to about 2E14 vg/kg (e.g., without plasma cell depletion and redosing). In another example, the viral titer is about 3E11 vg/kg to about 5E13 vg/kg (e.g., 2-3× lower with plasma cell depletion, due to 2-3 separate administrations with redosing).

[0775] Adeno-associated viruses (AAVs) are endemic in multiple species including human and non-human primates (NHPs). At least 12 natural serotypes and hundreds of natural variants have been isolated and characterized to date. See, e.g., Li et al. (2020) Nat. Rev. Genet. 21:255-272, herein incorporated by reference in its entirety for all purposes. AAV particles are naturally composed of a non-enveloped icosahedral protein capsid containing a single-stranded DNA (ssDNA) genome. The DNA genome is flanked by two inverted terminal repeats (ITRs) which serve as the viral origins of replication and packaging signals. The rep gene encodes four proteins required for viral replication and packaging whilst the cap gene encodes the three structural capsid subunits which dictate the AAV serotype, and the Assembly Activating Protein (AAP) which promotes virion assembly in some serotypes.

[0776] Recombinant AAV (rAAV) is currently one of the most commonly used viral vectors used in gene therapy to treat human diseases by delivering therapeutic transgenes to target cells in vivo. Indeed, rAAV vectors are composed of icosahedral capsids similar to natural AAVs, but rAAV virions do not encapsidate AAV protein-coding or AAV replicating sequences. These viral vectors are non-replicating. The only viral sequences required in rAAV vectors are the two ITRs, which are needed to guide genome replication and packaging during manufacturing of the rAAV vector. rAAV genomes are devoid of AAV rep and cap genes, rendering them non-replicating in vivo. rAAV vectors are produced by expressing rep and cap genes along with additional viral helper proteins in trans, in combination with the intended transgene cassette flanked by AAV ITRs.

[0777] In therapeutic rAAV genomes, a gene expression cassette is placed between ITR sequences. Typically, rAAV genome cassettes comprise of a promoter to drive expression of a therapeutic transgene, followed by polyadenylation sequence. The ITRs flanking a rAAV expression cassette can be derived from AAV2, the first serotype to be isolated and converted into a recombinant viral vector. Since then, most rAAV production methods rely on AAV2 Rep-based packaging systems. See, e.g., Colella et al. (2017) Mol. Ther. Methods Clin. Dev. 8:87-104, herein incorporated by reference in its entirety for all purposes.

[0778] Some non-limiting examples of ITRs that can be used include ITRs comprising, consisting essentially of, or consisting of SEQ ID NO: 281, SEQ ID NO: 282, or SEQ ID NO: 283. Other examples of ITRs comprise one or more mutations compared to SEQ ID NO: 281, SEQ ID NO: 282, or SEQ ID NO: 283 and can be at least 90%, at least 91%, at least 92%, at least 93%, at least 94%, at least 95%, at least 96%, at least 97%, at least 98%, or at least 99% identical to SEQ ID NO: 281, SEQ ID NO: 282, or SEQ ID NO: 283. In some rAAV genomes disclosed herein, the nucleic acid construct is flanked on both sides by the same ITR (i.e., the ITR on the 5′ end, and the reverse complement of the ITR on the 3′ end, such as SEQ ID NO: 281 on the 5′ end and SEQ ID NO: 291 on the 3′ end, or SEQ ID NO: 282 on the 5′ end and SEQ ID NO: 825 on the 3′ end, or SEQ ID NO: 283 on the 5′ end and SEQ ID NO: 826 on the 3′ end). In one example, the ITR on each end can comprise, consist essentially of, or consist of SEQ ID NO: 281 (i.e., SEQ ID NO: 281 on the 5′ end, and the reverse complement on the 3′ end). In another example, the ITR on each end can comprise, consist essentially of, or consist of SEQ ID NO: 282 (i.e., SEQ ID NO: 282 on the 5′ end, and the reverse complement on the 3′ end). In one example, the ITR on at least one end comprises, consists essentially of, or consists of SEQ ID NO: 283. In one example, the ITR on the 5′ end comprises, consists essentially of, or consists of SEQ ID NO: 283. In one example, the ITR on the 3′ end comprises, consists essentially of, or consists of SEQ ID NO: 283. In one example, the ITR on each end can comprise, consist essentially of, or consist of SEQ ID NO: 283 (i.e., SEQ ID NO: 283 on the 5′ end, and the reverse complement on the 3′ end). In other rAAV genomes disclosed herein, the nucleic acid construct is flanked by different ITRs on each end. In one example, the ITR on one end comprises, consists essentially of, or consists of SEQ ID NO: 281, and the ITR on the other end comprises, consists essentially of, or consists of SEQ ID NO: 282. In another example, the ITR on one end comprises, consists essentially of, or consists of SEQ ID NO: 281, and the ITR on the other end comprises, consists essentially of, or consists of SEQ ID NO: 283. In one example, the ITR on one end comprises, consists essentially of, or consists of SEQ ID NO: 282, and the ITR on the other end comprises, consists essentially of, or consists of SEQ ID NO: 283.

[0779] The specific serotype of a recombinant AAV vector influences its in vivo tropism to specific tissues. AAV capsid proteins are responsible for mediating attachment and entry into target cells, followed by endosomal escape and trafficking to the nucleus. Thus, the choice of serotype when developing a rAAV vector will influence what cell types and tissues the vector is most likely to bind to and transduce when injected in vivo. Several serotypes of rAAVs, including rAAV8, are capable of transducing the liver when delivered systemically in mice, NHPs and humans. See, e.g., Li et al. (2020) Nat. Rev. Genet. 21:255-272, herein incorporated by reference in its entirety for all purposes.

[0780] Once in the nucleus, the ssDNA genome is released from the virion and a complementary DNA strand is synthesized to generate a double-stranded DNA (dsDNA) molecule. Double-stranded AAV genomes naturally circularize via their ITRs and become episomes which will persist extrachromosomally in the nucleus. Therefore, for episomal gene therapy programs, rAAV-delivered rAAV episomes provide long-term, promoter-driven gene expression in non-dividing cells. However, this rAAV-delivered episomal DNA is diluted out as cells divide. In contrast, the gene therapy described herein is based on gene insertion to allow long-term gene expression.

[0781] When specific rAAVs comprising specific sequences (e.g., specific bidirectional construct sequences or specific unidirectional construct sequences) are disclosed herein, they are meant to encompass the sequence disclosed or the reverse complement of the sequence. For example, if a bidirectional or unidirectional construct disclosed herein consists of the hypothetical sequence 5′-CTGGACCGA-3′, it is also meant to encompass the reverse complement of that sequence (5′-TCGGTCCAG-3′). Likewise, when rAAVs comprising bidirectional or unidirectional construct elements in a specific 5′ to 3′ order are disclosed herein, they are also meant to encompass the reverse complement of the order of those elements. For example, if an rAAV is disclosed herein that comprises a bidirectional construct that comprises from 5′ to 3′ a first splice acceptor, a first coding sequence, a first terminator, a reverse complement of a second terminator, a reverse complement of a second coding sequence, and a reverse complement of a second splice acceptor, it is also meant to encompass a construct comprising from 5′ to 3′ the second splice acceptor, the second coding sequence, the second terminator, a reverse complement of the first terminator, a reverse complement of the first coding sequence, and a reverse complement of the first splice acceptor. Single-stranded AAV genomes are packaged as either sense (plus-stranded) or anti-sense (minus-stranded genomes), and single-stranded AAV genomes of + and − polarity are packaged with equal frequency into mature rAAV virions. See, e.g., LING et al. (2015) J. Mol. Genet. Med. 9(3):175, Zhou et al. (2008) Mol. Ther. 16(3):494-499, and Samulski et al. (1987) J. Virol. 61:3096-3101, each of which is herein incorporated by reference in its entirety for all purposes.

[0782] The ssDNA AAV genome consists of two open reading frames, Rep and Cap, flanked by two inverted terminal repeats that allow for synthesis of the complementary DNA strand. When constructing an AAV transfer plasmid, the transgene is placed between the two ITRs, and Rep and Cap can be supplied in trans. In addition to Rep and Cap, AAV can require a helper plasmid containing genes from adenovirus. These genes (E4, E2a, and VA) mediate AAV replication. For example, the transfer plasmid, Rep/Cap, and the helper plasmid can be transfected into HEK293 cells containing the adenovirus gene E1+ to produce infectious AAV particles. Alternatively, the Rep, Cap, and adenovirus helper genes may be combined into a single plasmid. Similar packaging cells and methods can be used for other viruses, such as retroviruses.

[0783] Multiple serotypes of AAV have been identified. These serotypes differ in the types of cells they infect (i.e., their tropism), allowing preferential transduction of specific cell types. The term AAV includes, for example, AAV1, AAV2, AAV3, AAV3B, AAV4, AAV5, AAV6, AAV6.2, AAV7, AAVrh.64R1, AAVhu.37, AAVrh.8, AAVrh.32.33, AAV8, AAV9, AAV-DJ, AAV2/8, AAVrh10, AAVLK03, AV10, AAV11, AAV12, rh10, and hybrids thereof, avian AAV, bovine AAV, canine AAV, equine AAV, primate AAV, non-primate AAV, and ovine AAV. The genomic sequences of various serotypes of AAV, as well as the sequences of the native terminal repeats (TRs), Rep proteins, and capsid subunits are known in the art. Such sequences may be found in the literature or in public databases such as GenBank. An “AAV vector” as used herein refers to an AAV vector comprising a heterologous sequence not of AAV origin (i.e., a nucleic acid sequence heterologous to AAV), typically comprising a sequence encoding an exogenous polypeptide of interest. The construct may comprise an AAV1, AAV2, AAV3, AAV3B, AAV4, AAV5, AAV6, AAV6.2, AAV7, AAVrh.64R1, AAVhu.37, AAVrh.8, AAVrh.32.33, AAV8, AAV9, AAV-DJ, AAV2/8, AAVrh10, AAVLK03, AV10, AAV11, AAV12, rh10, and hybrids thereof, avian AAV, bovine AAV, canine AAV, equine AAV, primate AAV, non-primate AAV, and ovine AAV capsid sequence. In general, the heterologous nucleic acid sequence (the transgene) is flanked by at least one, and generally by two, AAV inverted terminal repeat sequences (ITRs). An AAV vector may either be single-stranded (ssAAV) or self-complementary (scAAV). Examples of serotypes for liver tissue include AAV3B, AAV5, AAV6, AAV7, AAV8, AAV9, AAVrh.74, and AAVhu.37, and particularly AAV8. In a specific example, the AAV vector comprising the nucleic acid construct can be recombinant AAV8 (rAAV8). A rAAV8 vector as described herein is one in which the capsid is from AAV8. For example, an AAV vector using ITRs from AAV2 and a capsid of AAV8 is considered herein to be a rAAV8 vector.

[0784] Tropism can be further refined through pseudotyping, which is the mixing of a capsid and a genome from different viral serotypes. For example, AAV2/5 indicates a virus containing the genome of serotype 2 packaged in the capsid from serotype 5. Use of pseudotyped viruses can improve transduction efficiency, as well as alter tropism. Hybrid capsids derived from different serotypes can also be used to alter viral tropism. For example, AAV-DJ contains a hybrid capsid from eight serotypes and displays high infectivity across a broad range of cell types in vivo. AAV-DJ8 is another example that displays the properties of AAV-DJ but with enhanced brain uptake. AAV serotypes can also be modified through mutations. Examples of mutational modifications of AAV2 include Y444F, Y500F, Y730F, and S662V. Examples of mutational modifications of AAV3 include Y705F, Y731F, and T492V. Examples of mutational modifications of AAV6 include S663V and T492V. Other pseudotyped/modified AAV variants include AAV2/1, AAV2/6, AAV2/7, AAV2/8, AAV2/9, AAV2.5, AAV8.2, and AAV/SASTG.

[0785] To accelerate transgene expression, self-complementary AAV (scAAV) variants can be used. Because AAV depends on the cell's DNA replication machinery to synthesize the complementary strand of the AAV's single-stranded DNA genome, transgene expression may be delayed. To address this delay, scAAV containing complementary sequences that are capable of spontaneously annealing upon infection can be used, eliminating the requirement for host cell DNA synthesis. However, single-stranded AAV (ssAAV) vectors can also be used.

[0786] To increase packaging capacity, longer transgenes may be split between two AAV transfer plasmids, the first with a 3′ splice donor and the second with a 5′ splice acceptor. Upon co-infection of a cell, these viruses form concatemers, are spliced together, and the full-length transgene can be expressed. Although this allows for longer transgene expression, expression is less efficient. Similar methods for increasing capacity utilize homologous recombination. For example, a transgene can be divided between two transfer plasmids but with substantial sequence overlap such that co-expression induces homologous recombination and expression of the full-length transgene.

[0787] The vector (e.g., AAV such as recombinant AAV8) can be formulated, for example, in 10 mM sodium phosphate, 180 mM sodium chloride, and 0.005% poloxamer 188, at pH 7.3.

### XVI. Nuclease Agents and CRISPR/Cas Systems

[0788] The methods and compositions and combinations disclosed herein can utilize nuclease agents such as Clustered Regularly Interspersed Short Palindromic Repeats (CRISPR)/CRISPR-associated (Cas) systems, zinc finger nuclease (ZFN) systems, or Transcription Activator-Like Effector Nuclease (TALEN) systems or components of such systems to modify a target genomic locus in a target gene such as a safe harbor gene (e.g., ALB) for insertion of a nucleic acid construct as disclosed herein. See, e.g., WO 2023/077012 and US 2023-0149563, each of which is herein incorporated by reference in its entirety for all purposes. Generally, the nuclease agents involve the use of engineered cleavage systems to induce a double strand break or a nick (i.e., a single strand break) in a nuclease target site. Cleavage or nicking can occur through the use of specific nucleases such as engineered ZFNs, TALENs, or CRISPR/Cas systems with an engineered guide RNA to guide specific cleavage or nicking of the nuclease target site. Any nuclease agent that induces a nick or double-strand break at a desired target sequence can be used in the methods and compositions disclosed herein. The nuclease agent can be used to create a site of insertion at a desired locus (target gene) within a host genome, at which site the nucleic acid construct is inserted to express the polypeptide of interest. The polypeptide of interest may be exogenous with respect to its insertion site or locus (target gene), such as a safe harbor locus from which polypeptide of interest is not normally expressed. Alternatively, the polypeptide of interest may be non-exogenous with respect to its insertion site, such as insertion into an endogenous locus encoding the polypeptide of interest to correct a defective gene encoding the polypeptide of interest.

[0789] In one example, the nuclease agent is a CRISPR/Cas system. In another example, the nuclease agent comprises one or more ZFNs. In yet another example, the nuclease agent comprises one or more TALENs. In a specific example, the CRISPR/Cas systems or components of such systems target an ALB gene or locus (e.g., ALB genomic locus) within a cell, or intron 1 of an ALB gene or locus within a cell. In a more specific example, the CRISPR/Cas systems or components of such systems target a human ALB gene or locus or intron 1 of a human ALB gene or locus within a cell.

[0790] CRISPR/Cas systems include transcripts and other elements involved in the expression of, or directing the activity of, Cas genes. A CRISPR/Cas system can be, for example, a type I, a type II, a type III system, or a type V system (e.g., subtype V-A or subtype V-B). The methods and compositions disclosed herein can employ CRISPR/Cas systems by utilizing CRISPR complexes (comprising a guide RNA (gRNA) complexed with a Cas protein) for site-directed binding or cleavage of nucleic acids. A CRISPR/Cas system targeting an ALB gene or locus comprises a Cas protein (or a nucleic acid encoding the Cas protein) and one or more guide RNAs (or DNAs encoding the one or more guide RNAs), with each of the one or more guide RNAs targeting a different guide RNA target sequence in the target genomic locus (e.g., ALB gene or locus).

[0791] CRISPR/Cas systems used in the compositions and methods disclosed herein can be non-naturally occurring. A non-naturally occurring system includes anything indicating the involvement of the hand of man, such as one or more components of the system being altered or mutated from their naturally occurring state, being at least substantially free from at least one other component with which they are naturally associated in nature, or being associated with at least one other component with which they are not naturally associated. For example, some CRISPR/Cas systems employ non-naturally occurring CRISPR complexes comprising a gRNA and a Cas protein that do not naturally occur together, employ a Cas protein that does not occur naturally, or employ a gRNA that does not occur naturally.

### A. Target Genomic Loci and Albumin (ALB)

[0792] Any target genomic locus capable of expressing a gene can be used, such as a safe harbor locus (safe harbor gene, such as ALB) or an endogenous locus that would normally encode the polypeptide interest (e.g., a F9 locus for Factor IX, or a GAA locus for lysosomal alpha-glucosidase). The nucleic acid construct can be integrated into any part of the target genomic locus. For example, the nucleic acid construct can be inserted into an intron or an exon of a target genomic locus or can replace one or more introns and/or exons of a target genomic locus. In a specific example, the nucleic acid construct can be integrated into an intron of the target genomic locus, such as the first intron of the target genomic locus (e.g., ALB intron 1). See, e.g., WO 2020/082042, US 2020/0270617, WO 2020/082041, US 2020/0268906, WO 2020/082046, and US 2020/0289628, each of which is herein incorporated by reference in its entirety for all purposes. Constructs integrated into a target genomic locus can be operably linked to an endogenous promoter at the target genomic locus (e.g., the endogenous ALB promoter).

[0793] Interactions between integrated exogenous DNA and a host genome can limit the reliability and safety of integration and can lead to overt phenotypic effects that are not due to the targeted genetic modification but are instead due to unintended effects of the integration on surrounding endogenous genes. For example, randomly inserted transgenes can be subject to position effects and silencing, making their expression unreliable and unpredictable. Likewise, integration of exogenous DNA into a chromosomal locus can affect surrounding endogenous genes and chromatin, thereby altering cell behavior and phenotypes. Safe harbor loci include chromosomal loci where transgenes or other exogenous nucleic acid inserts can be stably and reliably expressed in all tissues of interest without overtly altering cell behavior or phenotype (i.e., without any deleterious effects on the host cell). See, e.g., Sadelain et al. (2012) Nat. Rev. Cancer 12:51-58, herein incorporated by reference in its entirety for all purposes. For example, the safe harbor locus can be one in which expression of the inserted gene sequence is not perturbed by any read-through expression from neighboring genes. For example, safe harbor loci can include chromosomal loci where exogenous DNA can integrate and function in a predictable manner without adversely affecting endogenous gene structure or expression. Safe harbor loci can include extragenic regions or intragenic regions such as, for example, loci within genes that are non-essential, dispensable, or able to be disrupted without overt phenotypic consequences.

[0794] Such safe harbor loci can offer an open chromatin configuration in all tissues and can be ubiquitously expressed during embryonic development and in adults. See, e.g., Zambrowicz et al. (1997) Proc. Natl. Acad. Sci. U.S.A. 94:3789-3794, herein incorporated by reference in its entirety for all purposes. In addition, the safe harbor loci can be targeted with high efficiency, and safe harbor loci can be disrupted with no overt phenotype. Examples of safe harbor loci include ALB, CCR5, HPRT, AAVS1, and Rosa26. See, e.g., U.S. Pat. Nos. 7,888,121; 7,972,854; 7,914,796; 7,951,925; 8,110,379; 8,409,861; 8,586,526; and US Patent Publication Nos. 2003/0232410; 2005/0208489; 2005/0026157; 2006/0063231; 2008/0159996; 2010/00218264; 2012/0017290; 2011/0265198; 2013/0137104; 2013/0122591; 2013/0177983; 2013/0177960; and 2013/0122591, each of which is herein incorporated by reference in its entirety for all purposes. Other examples of target genomic loci include an ALB locus, a EESYR locus, a SARS locus, position 188,083,272 of human chromosome 1 or its non-human mammalian orthologue, position 3,046,320 of human chromosome 10 or its non-human mammalian orthologue, position 67,328,980 of human chromosome 17 or its non-human mammalian orthologue, an adeno-associated virus site 1 (AAVS1) on chromosome, a naturally occurring site of integration of AAV virus on human chromosome 19 or its non-human mammalian orthologue, a chemokine receptor 5 (CCR5) gene, a chemokine receptor gene encoding an HIV-1 coreceptor, or a mouse Rosa26 locus or its non-murine mammalian orthologue.

[0795] In a specific example, a safe harbor locus is a locus within the genome wherein a gene may be inserted without significant deleterious effects on the host cell such as a hepatocyte (e.g., without causing apoptosis, necrosis, and/or senescence, or without causing more than 5%, 10%, 15%, 20%, 25%, 30%, or 40% apoptosis, necrosis, and/or senescence as compared to a control population of cells). The safe harbor locus can allow overexpression of an exogenous gene without significant deleterious effects on the host cell such as a hepatocyte (e.g., without causing apoptosis, necrosis, and/or senescence, or without causing more than 5%, 10%, 15%, 20%, 25%, 30%, or 40% apoptosis, necrosis, and/or senescence as compared to a control population of cells). A desirable safe harbor locus may be one in which expression of the inserted gene sequence is not perturbed by read-through expression from neighboring genes. The safe harbor may be a human safe harbor (e.g., for a liver tissue or hepatocyte host cell).

[0796] In a specific example, the target genomic locus is an ALB locus, such as intron 1 of an ALB locus. In a more specific example, the target genomic locus is a human ALB locus, such as intron 1 of a human ALB locus (e.g., SEQ ID NO: 127).

[0797] In another specific example, the target genomic locus is a TTR locus, such as intron 1 of a TTR locus. In a more specific example, the target genomic locus is a human TTR locus, such as intron 1 of a human TTR locus.

### B. Cas Proteins

[0798] Cas proteins generally comprise at least one RNA recognition or binding domain that can interact with guide RNAs. Cas proteins can also comprise nuclease domains (e.g., DNase domains or RNase domains), DNA-binding domains, helicase domains, protein-protein interaction domains, dimerization domains, and other domains. Some such domains (e.g., DNase domains) can be from a native Cas protein. Other such domains can be added to make a modified Cas protein. A nuclease domain possesses catalytic activity for nucleic acid cleavage, which includes the breakage of the covalent bonds of a nucleic acid molecule. Cleavage can produce blunt ends or staggered ends, and it can be single-stranded or double-stranded. For example, a wild type Cas9 protein will typically create a blunt cleavage product. Alternatively, a wild type Cpf1 protein (e.g., FnCpf1) can result in a cleavage product with a 5-nucleotide 5′ overhang, with the cleavage occurring after the 18th base pair from the PAM sequence on the non-targeted strand and after the 23rd base on the targeted strand. A Cas protein can have full cleavage activity to create a double-strand break at a target genomic locus (e.g., a double-strand break with blunt ends), or it can be a nickase that creates a single-strand break at a target genomic locus.

[0799] Examples of Cas proteins include Cas1, Cas1B, Cas2, Cas3, Cas4, Cas5, Cas5e (CasD), Cas6, Cas6e, Cas6f, Cas7, Cas8a1, Cas8a2, Cas8b, Cas8c, Cas9 (Csn1 or Csx12), Cas10, Cas10d, CasF, CasG, CasH, Csy1, Csy2, Csy3, Cse1 (CasA), Cse2 (CasB), Cse3 (CasE), Cse4 (CasC), Cscl, Csc2, Csa5, Csn2, Csm2, Csm3, Csm4, Csm5, Csm6, Cmrl, Cmr3, Cmr4, Cmr5, Cmr6, Csbl, Csb2, Csb3, Csx17, Csx14, Csx10, Csx16, CsaX, Csx3, Csx1, Csx15, Csf1, Csf2, Csf3, Csf4, and Cu1966, and homologs or modified versions thereof.

[0800] An exemplary Cas protein is a Cas9 protein or a protein derived from a Cas9 protein. Cas9 proteins are from a type II CRISPR/Cas system and typically share four key motifs with a conserved architecture. Motifs 1, 2, and 4 are RuvC-like motifs, and motif 3 is an HNH motif. Exemplary Cas9 proteins are from Streptococcus pyogenes, Streptococcus thermophilus, Streptococcus sp., Staphylococcus aureus, Nocardiopsis dassonvillei, Streptomyces pristinaespiralis, Streptomyces viridochromogenes, Streptomyces viridochromogenes, Streptosporangium roseum, Streptosporangium roseum, Alicyclobacillus acidocaldarius, Bacillus pseudomycoides, Bacillus selenitireducens, Exiguobacterium sibiricum, Lactobacillus delbrueckii, Lactobacillus salivarius, Microscilla marina, Burkholderiales bacterium, Polaromonas naphthalenivorans, Polaromonas sp., Crocosphaera watsonii, Cyanothece sp., Microcystis aeruginosa, Synechococcus sp., Acetohalobium arabaticum, Ammonifex degensii, Caldicelulosiruptor becscii, Candidatus Desulforudis, Clostridium botulinum, Clostridium difficile, Finegoldia magna, Natranaerobius thermophilus, Pelotomaculum thermopropionicum, Acidithiobacillus caldus, Acidithiobacillus ferrooxidans, Allochromatium vinosum, Marinobacter sp., Nitrosococcus halophilus, Nitrosococcus watsoni, Pseudoalteromonas haloplanktis, Ktedonobacter racemifer, Methanohalobium evestigatum, Anabaena variabilis, Nodularia spumigena, Nostoc sp., Arthrospira maxima, Arthrospira platensis, Arthrospira sp., Lyngbya sp., Microcoleus chthonoplastes, Oscillatoria sp., Petrotoga mobilis, Thermosipho africanus, Acaryochloris marina, Neisseria meningitidis, or Campylobacter jejuni. Additional examples of the Cas9 family members are described in WO 2014/131833, herein incorporated by reference in its entirety for all purposes. Cas9 from S. pyogenes (SpCas9) (e.g., assigned UniProt accession number Q99ZW2) is an exemplary Cas9 protein. An exemplary SpCas9 protein sequence is set forth in SEQ ID NO: 131 (encoded by the DNA sequence set forth in SEQ ID NO: 132). An exemplary SpCas9 mRNA (cDNA) sequence is set forth in SEQ ID NO: 133. Smaller Cas9 proteins (e.g., Cas9 proteins whose coding sequences are compatible with the maximum AAV packaging capacity when combined with a guide RNA coding sequence and regulatory elements for the Cas9 and guide RNA, such as SaCas9 and CjCas9 and Nme2Cas9) are other exemplary Cas9 proteins. For example, Cas9 from S. aureus (SaCas9) (e.g., assigned UniProt accession number J7RUA5) is another exemplary Cas9 protein. Likewise, Cas9 from Campylobacter jejuni (CjCas9) (e.g., assigned UniProt accession number Q0P897) is another exemplary Cas9 protein. See, e.g., Kim et al. (2017) Nat. Commun. 8:14500, herein incorporated by reference in its entirety for all purposes. SaCas9 is smaller than SpCas9, and CjCas9 is smaller than both SaCas9 and SpCas9. Cas9 from Neisseria meningitidis (Nme2Cas9) is another exemplary Cas9 protein. See, e.g., Edraki et al. (2019) Mol. Cell 73(4):714-726, herein incorporated by reference in its entirety for all purposes. Cas9 proteins from Streptococcus thermophilus (e.g., Streptococcus thermophilus LMD-9 Cas9 encoded by the CRISPR1 locus (St1Cas9) or Streptococcus thermophilus Cas9 from the CRISPR3 locus (St3Cas9)) are other exemplary Cas9 proteins. Cas9 from Francisella novicida (FnCas9) or the RHA Francisella novicida Cas9 variant that recognizes an alternative PAM (E1369R/E1449H/R1556A substitutions) are other exemplary Cas9 proteins. These and other exemplary Cas9 proteins are reviewed, e.g., in Cebrian-Serrano and Davies (2017) Mamm. Genome 28(7):247-261, herein incorporated by reference in its entirety for all purposes. Examples of Cas9 coding sequences, Cas9 mRNAs, and Cas9 protein sequences are provided in WO 2013/176772, WO 2014/065596, WO 2016/106121, WO 2019/067910, WO 2020/082042, US 2020/0270617, WO 2020/082041, US 2020/0268906, WO 2020/082046, and US 2020/0289628, each of which is herein incorporated by reference in its entirety for all purposes. Specific examples of ORFs and Cas9 amino acid sequences are provided in Table 30 at paragraph [0449] WO 2019/067910, and specific examples of Cas9 mRNAs and ORFs are provided in paragraphs [0214]-[0234] of WO 2019/067910. See also WO 2020/082046 A2 (pp. 84-85) and Table 24 in WO 2020/069296, each of which is herein incorporated by reference in its entirety for all purposes. An exemplary SpCas9 protein sequence comprises, consists essentially of, or consists of SEQ ID NO: 134. An exemplary SpCas9 mRNA sequence encoding that SpCas9 protein sequence comprises, consists essentially of, or consists of SEQ ID NO: 135. Another exemplary SpCas9 mRNA sequence encoding that SpCas9 protein sequence comprises, consists essentially of, or consists of SEQ ID NO: 124. Another exemplary SpCas9 mRNA sequence encoding that SpCas9 protein sequence comprises SEQ ID NO: 125. An exemplary SpCas9 coding sequence comprises, consists essentially of, or consists of SEQ ID NO: 126.

[0801] Another example of a Cas protein is a Cpf1 (CRISPR from Prevotella and Francisella 1) protein. Cpf1 is a large protein (about 1300 amino acids) that contains a RuvC-like nuclease domain homologous to the corresponding domain of Cas9 along with a counterpart to the characteristic arginine-rich cluster of Cas9. However, Cpf1 lacks the HNH nuclease domain that is present in Cas9 proteins, and the RuvC-like domain is contiguous in the Cpf1 sequence, in contrast to Cas9 where it contains long inserts including the HNH domain. See, e.g., Zetsche et al. (2015) Cell 163(3):759-771, herein incorporated by reference in its entirety for all purposes. Exemplary Cpf1 proteins are from Francisella tularensis 1, Francisella tularensis subsp. novicida, Prevotella albensis, Lachnospiraceae bacterium MC2017 1, Butyrivibrio proteoclasticus, Peregrinibacteria bacterium GW2011_GWA2_33_10, Parcubacteria bacterium GW2011_GWC2-44 17, Smithella sp. SCADC, Acidaminococcus sp. BV3L6, Lachnospiraceae bacterium MA2020, Candidatus Methanoplasma termitum, Eubacterium eligens, Moraxella bovoculi 237, Leptospira inadai, Lachnospiraceae bacterium ND2006, Porphyromonas crevioricanis 3, Prevotella disiens, and Porphyromonas macacae. Cpf1 from Francisella novicida U112 (FnCpf1; assigned UniProt accession number AOQ7Q2) is an exemplary Cpf1 protein.

[0802] Another example of a Cas protein is CasX (Cas12e). CasX is an RNA-guided DNA endonuclease that generates a staggered double-strand break in DNA. CasX is less than 1000 amino acids in size. Exemplary CasX proteins are from Deltaproteobacteria (DpbCasX or DpbCas12e) and Planctomycetes (PlmCasX or PlmCas12e). Like Cpf1, CasX uses a single RuvC active site for DNA cleavage. See, e.g., Liu et al. (2019) Nature 566(7743):218-223, herein incorporated by reference in its entirety for all purposes.

[0803] Another example of a Cas protein is CasΦ (CasPhi or Cas12j), which is uniquely found in bacteriophages. CasΦ is less than 1000 amino acids in size (e.g., 700-800 amino acids). CasΦ cleavage generates staggered 5′ overhangs. A single RuvC active site in CasΦ is capable of crRNA processing and DNA cutting. See, e.g., Pausch et al. (2020) Science 369(6501):333-337, herein incorporated by reference in its entirety for all purposes.

[0804] Cas proteins can be wild type proteins (i.e., those that occur in nature), modified Cas proteins (i.e., Cas protein variants), or fragments of wild type or modified Cas proteins. Cas proteins can also be active variants or fragments with respect to catalytic activity of wild type or modified Cas proteins. Active variants or fragments with respect to catalytic activity can comprise at least 80%, 85%, 90%, 91%, 92%, 93%, 94%, 95%, 96%, 97%, 98%, 99% or more sequence identity to the wild type or modified Cas protein or a portion thereof, wherein the active variants retain the ability to cut at a desired cleavage site and hence retain nick-inducing or double-strand-break-inducing activity. Assays for nick-inducing or double-strand-break-inducing activity are known and generally measure the overall activity and specificity of the Cas protein on DNA substrates containing the cleavage site.

[0805] One example of a modified Cas protein is the modified SpCas9-HF1 protein, which is a high-fidelity variant of Streptococcus pyogenes Cas9 harboring alterations (N497A/R661A/Q695A/Q926A) designed to reduce non-specific DNA contacts. See, e.g., Kleinstiver et al. (2016) Nature 529(7587):490-495, herein incorporated by reference in its entirety for all purposes. Another example of a modified Cas protein is the modified eSpCas9 variant (K848A/K1003A/R1060A) designed to reduce off-target effects. See, e.g., Slaymaker et al. (2016) Science 351(6268):84-88, herein incorporated by reference in its entirety for all purposes. Other SpCas9 variants include K855A and K810A/K1003A/R1060A. These and other modified Cas proteins are reviewed, e.g., in Cebrian-Serrano and Davies (2017) Mamm. Genome 28(7):247-261, herein incorporated by reference in its entirety for all purposes. Another example of a modified Cas9 protein is xCas9, which is a SpCas9 variant that can recognize an expanded range of PAM sequences. See, e.g., Hu et al. (2018) Nature 556:57-63, herein incorporated by reference in its entirety for all purposes.

[0806] Cas proteins can be modified to increase or decrease one or more of nucleic acid binding affinity, nucleic acid binding specificity, and enzymatic activity. Cas proteins can also be modified to change any other activity or property of the protein, such as stability. For example, one or more nuclease domains of the Cas protein can be modified, deleted, or inactivated, or a Cas protein can be truncated to remove domains that are not essential for the function of the protein or to optimize (e.g., enhance or reduce) the activity of or a property of the Cas protein.

[0807] Cas proteins can comprise at least one nuclease domain, such as a DNase domain. For example, a wild type Cpf1 protein generally comprises a RuvC-like domain that cleaves both strands of target DNA, perhaps in a dimeric configuration. Likewise, CasX and CasΦ generally comprise a single RuvC-like domain that cleaves both strands of a target DNA. Cas proteins can also comprise at least two nuclease domains, such as DNase domains. For example, a wild type Cas9 protein generally comprises a RuvC-like nuclease domain and an HNH-like nuclease domain. The RuvC and HNH domains can each cut a different strand of double-stranded DNA to make a double-stranded break in the DNA. See, e.g., Jinek et al. (2012) Science 337(6096):816-821, herein incorporated by reference in its entirety for all purposes.

[0808] One or more of the nuclease domains can be deleted or mutated so that they are no longer functional or have reduced nuclease activity. For example, if one of the nuclease domains is deleted or mutated in a Cas9 protein, the resulting Cas9 protein can be referred to as a nickase and can generate a single-strand break within a double-stranded target DNA but not a double-strand break (i.e., it can cleave the complementary strand or the non-complementary strand, but not both). If none of the nuclease domains is deleted or mutated in a Cas9 protein, the Cas9 protein will retain double-strand-break-inducing activity. An example of a mutation that converts Cas9 into a nickase is a D10A (aspartate to alanine at position 10 of Cas9) mutation in the RuvC domain of Cas9 from S. pyogenes. Likewise, H939A (histidine to alanine at amino acid position 839), H840A (histidine to alanine at amino acid position 840), or N863A (asparagine to alanine at amino acid position N863) in the HNH domain of Cas9 from S. pyogenes can convert the Cas9 into a nickase. Other examples of mutations that convert Cas9 into a nickase include the corresponding mutations to Cas9 from S. thermophilus. See, e.g., Sapranauskas et al. (2011) Nucleic Acids Res. 39(21):9275-9282 and WO 2013/141680, each of which is herein incorporated by reference in its entirety for all purposes. Such mutations can be generated using methods such as site-directed mutagenesis, PCR-mediated mutagenesis, or total gene synthesis. Examples of other mutations creating nickases can be found, for example, in WO 2013/176772 and WO 2013/142578, each of which is herein incorporated by reference in its entirety for all purposes.

[0809] Examples of inactivating mutations in the catalytic domains of xCas9 are the same as those described above for SpCas9. Examples of inactivating mutations in the catalytic domains of Staphylococcus aureus Cas9 proteins are also known. For example, the Staphylococcus aureus Cas9 enzyme (SaCas9) may comprise a substitution at position N580 (e.g., N580A substitution) or a substitution at position D10 (e.g., D10A substitution) to generate a Cas nickase. See, e.g., WO 2016/106236, herein incorporated by reference in its entirety for all purposes. Examples of inactivating mutations in the catalytic domains of Nme2Cas9 are also known (e.g., D16A or H588A). Examples of inactivating mutations in the catalytic domains of St1Cas9 are also known (e.g., D9A, D598A, H599A, or N622A). Examples of inactivating mutations in the catalytic domains of St3Cas9 are also known (e.g., D10A or N870A). Examples of inactivating mutations in the catalytic domains of CjCas9 are also known (e.g., combination of D8A or H559A). Examples of inactivating mutations in the catalytic domains of FnCas9 and RHA FnCas9 are also known (e.g., N995A).

[0810] Examples of inactivating mutations in the catalytic domains of Cpf1 proteins are also known. With reference to Cpf1 proteins from Francisella novicida U112 (FnCpf1), Acidaminococcus sp. BV3L6 (AsCpf1), Lachnospiraceae bacterium ND2006 (LbCpf1), and Moraxella bovoculi 237 (MbCpf1 Cpf1), such mutations can include mutations at positions 908, 993, or 1263 of AsCpf1 or corresponding positions in Cpf1 orthologs, or positions 832, 925, 947, or 1180 of LbCpf1 or corresponding positions in Cpf1 orthologs. Such mutations can include, for example, one or more of mutations D908A, E993A, and D1263A of AsCpf1 or corresponding mutations in Cpf1 orthologs, or D832A, E925A, D947A, and D1180A of LbCpf1 or corresponding mutations in Cpf1 orthologs. See, e.g., US 2016/0208243, herein incorporated by reference in its entirety for all purposes.

[0811] Examples of inactivating mutations in the catalytic domains of CasX proteins are also known. With reference to CasX proteins from Deltaproteobacteria, D672A, E769A, and D935A (individually or in combination) or corresponding positions in other CasX orthologs are inactivating. See, e.g., Liu et al. (2019) Nature 566(7743):218-223, herein incorporated by reference in its entirety for all purposes.

[0812] Examples of inactivating mutations in the catalytic domains of CasΦ proteins are also known. For example, D371A and D394A, alone or in combination, are inactivating mutations. See, e.g., Pausch et al. (2020) Science 369(6501):333-337, herein incorporated by reference in its entirety for all purposes.

[0813] Cas proteins can also be operably linked to heterologous polypeptides as fusion proteins. For example, a Cas protein can be fused to a cleavage domain. See WO 2014/089290, herein incorporated by reference in its entirety for all purposes Cas proteins can also be fused to a heterologous polypeptide providing increased or decreased stability. The fused domain or heterologous polypeptide can be located at the N-terminus, the C-terminus, or internally within the Cas protein.

[0814] As one example, a Cas protein can be fused to one or more heterologous polypeptides that provide for subcellular localization. Such heterologous polypeptides can include, for example, one or more nuclear localization signals (NLS) such as the monopartite SV40 NLS and/or a bipartite alpha-importin NLS for targeting to the nucleus, a mitochondrial localization signal for targeting to the mitochondria, an ER retention signal, and the like. See, e.g., Lange et al. (2007) J. Biol. Chem. 282(8):5101-5105, herein incorporated by reference in its entirety for all purposes. Such subcellular localization signals can be located at the N-terminus, the C-terminus, or anywhere within the Cas protein. An NLS can comprise a stretch of basic amino acids, and can be a monopartite sequence or a bipartite sequence. Optionally, a Cas protein can comprise two or more NLSs, including an NLS (e.g., an alpha-importin NLS or a monopartite NLS) at the N-terminus and an NLS (e.g., an SV40 NLS or a bipartite NLS) at the C-terminus. A Cas protein can also comprise two or more NLSs at the N-terminus and/or two or more NLSs at the C-terminus.

[0815] A Cas protein may, for example, be fused with 1-10 NLSs (e.g., fused with 1-5 NLSs or fused with one NLS. Where one NLS is used, the NLS may be linked at the N-terminus or the C-terminus of the Cas protein sequence. It may also be inserted within the Cas protein sequence. Alternatively, the Cas protein may be fused with more than one NLS. For example, the Cas protein may be fused with 2, 3, 4, or 5 NLSs. In a specific example, the Cas protein may be fused with two NLSs. In certain circumstances, the two NLSs may be the same (e.g., two SV40 NLSs) or different. For example, the Cas protein can be fused to two SV40 NLS sequences linked at the carboxy terminus. Alternatively, the Cas protein may be fused with two NLSs, one linked at the N-terminus and one at the C-terminus. In other examples, the Cas protein may be fused with 3 NLSs or with no NLS. The NLS may be a monopartite sequence, such as, e.g., the SV40 NLS, PKKKRKV (SEQ ID NO: 136) or PKKKRRV (SEQ ID NO: 137). The NLS may be a bipartite sequence, such as the NLS of nucleoplasmin, KRPAATKKAGQAKKKK (SEQ ID NO: 138). In a specific example, a single PKKKRKV (SEQ ID NO: 136) NLS may be linked at the C-terminus of the Cas protein. One or more linkers are optionally included at the fusion site.

[0816] Cas proteins can also be operably linked to a cell-penetrating domain or protein transduction domain. For example, the cell-penetrating domain can be derived from the HIV-1 TAT protein, the TLM cell-penetrating motif from human hepatitis B virus, MPG, Pep-1, VP22, a cell penetrating peptide from Herpes simplex virus, or a polyarginine peptide sequence. See, e.g., WO 2014/089290 and WO 2013/176772, each of which is herein incorporated by reference in its entirety for all purposes. The cell-penetrating domain can be located at the N-terminus, the C-terminus, or anywhere within the Cas protein.

[0817] Cas proteins can also be operably linked to a heterologous polypeptide for ease of tracking or purification, such as a fluorescent protein, a purification tag, or an epitope tag. Examples of fluorescent proteins include green fluorescent proteins (e.g., GFP, GFP-2, tagGFP, turboGFP, eGFP, Emerald, Azami Green, Monomeric Azami Green, CopGFP, AceGFP, ZsGreenl), yellow fluorescent proteins (e.g., YFP, eYFP, Citrine, Venus, YPet, PhiYFP, ZsYellowl), blue fluorescent proteins (e.g., eBFP, eBFP2, Azurite, mKalamal, GFPuv, Sapphire, T-sapphire), cyan fluorescent proteins (e.g., eCFP, Cerulean, CyPet, AmCyanl, Midoriishi-Cyan), red fluorescent proteins (e.g., mKate, mKate2, mPlum, DsRed monomer, mCherry, mRFP1, DsRed-Express, DsRed2, DsRed-Monomer, HcRed-Tandem, HcRedl, AsRed2, eqFP611, mRaspberry, mStrawberry, Jred), orange fluorescent proteins (e.g., mOrange, mKO, Kusabira-Orange, Monomeric Kusabira-Orange, mTangerine, tdTomato), and any other suitable fluorescent protein. Examples of tags include glutathione-S-transferase (GST), chitin binding protein (CBP), maltose binding protein, thioredoxin (TRX), poly(NANP), tandem affinity purification (TAP) tag, myc, AcV5, AU1, AU5, E, ECS, E2, FLAG, hemagglutinin (HA), nus, Softag 1, Softag 3, Strep, SBP, Glu-Glu, HSV, KT3, S, S1, T7, V5, VSV-G, histidine (His), biotin carboxyl carrier protein (BCCP), and calmodulin.

[0818] Cas proteins can also be tethered to labeled nucleic acids. Such tethering (i.e., physical linking) can be achieved through covalent interactions or noncovalent interactions, and the tethering can be direct (e.g., through direct fusion or chemical conjugation, which can be achieved by modification of cysteine or lysine residues on the protein or intein modification), or can be achieved through one or more intervening linkers or adapter molecules such as streptavidin or aptamers. See, e.g., Pierce et al. (2005) Mini Rev. Med. Chem. 5(1):41-55; Duckworth et al. (2007) Angew. Chem. Int. Ed. Engl. 46(46):8819-8822; Schaeffer and Dixon (2009) Australian J. Chem. 62(10):1328-1332; Goodman et al. (2009) Chembiochem. 10(9):1551-1557; and Khatwani et al. (2012) Bioorg. Med. Chem. 20(14):4532-4539, each of which is herein incorporated by reference in its entirety for all purposes. Noncovalent strategies for synthesizing protein-nucleic acid conjugates include biotin-streptavidin and nickel-histidine methods. Covalent protein-nucleic acid conjugates can be synthesized by connecting appropriately functionalized nucleic acids and proteins using a wide variety of chemistries. Some of these chemistries involve direct attachment of the oligonucleotide to an amino acid residue on the protein surface (e.g., a lysine amine or a cysteine thiol), while other more complex schemes require post-translational modification of the protein or the involvement of a catalytic or reactive protein domain. Methods for covalent attachment of proteins to nucleic acids can include, for example, chemical cross-linking of oligonucleotides to protein lysine or cysteine residues, expressed protein-ligation, chemoenzymatic methods, and the use of photoaptamers. The labeled nucleic acid can be tethered to the C-terminus, the N-terminus, or to an internal region within the Cas protein. In one example, the labeled nucleic acid is tethered to the C-terminus or the N-terminus of the Cas protein. Likewise, the Cas protein can be tethered to the 5′ end, the 3′ end, or to an internal region within the labeled nucleic acid. That is, the labeled nucleic acid can be tethered in any orientation and polarity. For example, the Cas protein can be tethered to the 5′ end or the 3′ end of the labeled nucleic acid.

[0819] Cas proteins can be provided in any form. For example, a Cas protein can be provided in the form of a protein, such as a Cas protein complexed with a gRNA. Alternatively, a Cas protein can be provided in the form of a nucleic acid encoding the Cas protein, such as an RNA (e.g., messenger RNA (mRNA)) or DNA. Optionally, the nucleic acid encoding the Cas protein can be codon optimized for efficient translation into protein in a particular cell or organism. For example, the nucleic acid encoding the Cas protein can be modified to substitute codons having a higher frequency of usage in a bacterial cell, a yeast cell, a human cell, a non-human cell, a mammalian cell, a rodent cell, a mouse cell, a rat cell, or any other host cell of interest, as compared to the naturally occurring polynucleotide sequence. When a nucleic acid encoding the Cas protein is introduced into the cell, the Cas protein can be transiently, conditionally, or constitutively expressed in the cell.

[0820] Nucleic acids encoding Cas proteins can be stably integrated in the genome of a cell and operably linked to a promoter active in the cell. Alternatively, nucleic acids encoding Cas proteins can be operably linked to a promoter in an expression construct. Expression constructs include any nucleic acid constructs capable of directing expression of a gene or other nucleic acid sequence of interest (e.g., a Cas gene) and which can transfer such a nucleic acid sequence of interest to a target cell. For example, the nucleic acid encoding the Cas protein can be in a vector comprising a DNA encoding a gRNA. Alternatively, it can be in a vector or plasmid that is separate from the vector comprising the DNA encoding the gRNA. Promoters that can be used in an expression construct include promoters active, for example, in one or more of a eukaryotic cell, a human cell, a non-human cell, a mammalian cell, a non-human mammalian cell, a rodent cell, a mouse cell, a rat cell, a pluripotent cell, an embryonic stem (ES) cell, an adult stem cell, a developmentally restricted progenitor cell, an induced pluripotent stem (iPS) cell, or a one-cell stage embryo. Such promoters can be, for example, conditional promoters, inducible promoters, constitutive promoters, or tissue-specific promoters. Optionally, the promoter can be a bidirectional promoter driving expression of both a Cas protein in one direction and a guide RNA in the other direction. Such bidirectional promoters can consist of (1) a complete, conventional, unidirectional Pol III promoter that contains 3 external control elements: a distal sequence element (DSE), a proximal sequence element (PSE), and a TATA box; and (2) a second basic Pol III promoter that includes a PSE and a TATA box fused to the 5′ terminus of the DSE in reverse orientation. For example, in the H1 promoter, the DSE is adjacent to the PSE and the TATA box, and the promoter can be rendered bidirectional by creating a hybrid promoter in which transcription in the reverse direction is controlled by appending a PSE and TATA box derived from the U6 promoter. See, e.g., US 2016/0074535, herein incorporated by references in its entirety for all purposes. Use of a bidirectional promoter to express genes encoding a Cas protein and a guide RNA simultaneously allow for the generation of compact expression cassettes to facilitate delivery. In preferred embodiments, promotors are accepted by regulatory authorities for use in humans. In certain embodiments, promotors drive expression in a liver cell.

[0821] Different promoters can be used to drive Cas expression or Cas9 expression. In some methods, small promoters are used so that the Cas or Cas9 coding sequence can fit into an AAV construct. For example, Cas or Cas9 and one or more gRNAs (e.g., 1 gRNA or 2 gRNAs or 3 gRNAs or 4 gRNAs) can be delivered via LNP-mediated delivery (e.g., in the form of RNA) or adeno-associated virus (AAV)-mediated delivery (e.g., AAV2-mediated delivery, AAV5-mediated delivery, AAV8-mediated delivery, or AAV7m8-mediated delivery). For example, the nuclease agent can be CRISPR/Cas9, and a Cas9 mRNA and a gRNA targeting an intron 1 of an endogenous human ALB locus can be delivered via LNP-mediated delivery or AAV-mediated delivery. The Cas or Cas9 and the gRNA(s) can be delivered in a single AAV or via two separate AAVs. For example, a first AAV can carry a Cas or Cas9 expression cassette, and a second AAV can carry a gRNA expression cassette. Similarly, a first AAV can carry a Cas or Cas9 expression cassette, and a second AAV can carry two or more gRNA expression cassettes. Alternatively, a single AAV can carry a Cas or Cas9 expression cassette (e.g., Cas or Cas9 coding sequence operably linked to a promoter) and a gRNA expression cassette (e.g., gRNA coding sequence operably linked to a promoter). Similarly, a single AAV can carry a Cas or Cas9 expression cassette (e.g., Cas or Cas9 coding sequence operably linked to a promoter) and two or more gRNA expression cassettes (e.g., gRNA coding sequences operably linked to promoters). Different promoters can be used to drive expression of the gRNA, such as a U6 promoter or the small tRNA Gln. Likewise, different promoters can be used to drive Cas9 expression. For example, small promoters are used so that the Cas9 coding sequence can fit into an AAV construct. Similarly, small Cas9 proteins (e.g., SaCas9 or CjCas9 are used to maximize the AAV packaging capacity).

[0822] Cas proteins provided as mRNAs can be modified for improved stability and/or immunogenicity properties. The modifications may be made to one or more nucleosides within the mRNA. Examples of chemical modifications to mRNA nucleobases include pseudouridine, 1-methyl-pseudouridine, and 5-methyl-cytidine. mRNA encoding Cas proteins can also be capped. The cap can be, for example, a cap 1 structure in which the +1 ribonucleotide is methylated at the 2′O position of the ribose. The capping can, for example, give superior activity in vivo (e.g., by mimicking a natural cap), can result in a natural structure that reduce stimulation of the innate immune system of the host (e.g., can reduce activation of pattern recognition receptors in the innate immune system). mRNA encoding Cas proteins can also be polyadenylated (to comprise a poly(A) tail). mRNA encoding Cas proteins can also be modified to include pseudouridine (e.g., can be fully substituted with pseudouridine). As another example, capped and polyadenylated Cas mRNA containing N1-methyl-pseudouridine can be used. mRNA encoding Cas proteins can also be modified to include N1-methyl-pseudouridine (e.g., can be fully substituted with N1-methyl-pseudouridine). As another example, Cas mRNA fully substituted with pseudouridine can be used (i.e., all standard uracil residues are replaced with pseudouridine, a uridine isomer in which the uracil is attached with a carbon-carbon bond rather than nitrogen-carbon). As another example, Cas mRNA fully substituted with N1-methyl-pseudouridine can be used (i.e., all standard uracil residues are replaced with N1-methyl-pseudouridine). Likewise, Cas mRNAs can be modified by depletion of uridine using synonymous codons. For example, capped and polyadenylated Cas mRNA fully substituted with pseudouridine can be used. For example, capped and polyadenylated Cas mRNA fully substituted with N1-methyl-pseudouridine can be used.

[0823] Cas mRNAs can comprise a modified uridine at least at one, a plurality of, or all uridine positions. The modified uridine can be a uridine modified at the 5 position (e.g., with a halogen, methyl, or ethyl). The modified uridine can be a pseudouridine modified at the 1 position (e.g., with a halogen, methyl, or ethyl). The modified uridine can be, for example, pseudouridine, N1-methyl-pseudouridine, 5-methoxyuridine, 5-iodouridine, or a combination thereof. In some examples, the modified uridine is 5-methoxyuridine. In some examples, the modified uridine is 5-iodouridine. In some examples, the modified uridine is pseudouridine. In some examples, the modified uridine is N1-methyl-pseudouridine. In some examples, the modified uridine is a combination of pseudouridine and N1-methyl-pseudouridine. In some examples, the modified uridine is a combination of pseudouridine and 5-methoxyuridine. In some examples, the modified uridine is a combination of N1-methyl pseudouridine and 5-methoxyuridine. In some examples, the modified uridine is a combination of 5-iodouridine and N1-methyl-pseudouridine. In some examples, the modified uridine is a combination of pseudouridine and 5-iodouridine. In some examples, the modified uridine is a combination of 5-iodouridine and 5-methoxyuridine.

[0824] Cas mRNAs disclosed herein can also comprise a 5′ cap, such as a Cap0, Cap1, or Cap2. A 5′ cap is generally a 7-methylguanine ribonucleotide (which may be further modified, e.g., with respect to ARCA) linked through a 5′-triphosphate to the 5′ position of the first nucleotide of the 5′-to-3′ chain of the mRNA (i.e., the first cap-proximal nucleotide). In Cap0, the riboses of the first and second cap-proximal nucleotides of the mRNA both comprise a 2′-hydroxyl. In Cap1, the riboses of the first and second transcribed nucleotides of the mRNA comprise a 2′-methoxy and a 2′-hydroxyl, respectively. In Cap2, the riboses of the first and second cap-proximal nucleotides of the mRNA both comprise a 2′-methoxy. See, e.g., Katibah et al. (2014) Proc. Natl. Acad. Sci. U.S.A. 111(33):12025-30 and Abbas et al. (2017) Proc. Natl. Acad. Sci. U.S.A. 114(11):E2106-E2115, each of which is herein incorporated by reference in its entirety for all purposes. Most endogenous higher eukaryotic mRNAs, including mammalian mRNAs such as human mRNAs, comprise Cap1 or Cap2. Cap0 and other cap structures differing from Cap1 and Cap2 may be immunogenic in mammals, such as humans, due to recognition as non-self by components of the innate immune system such as IFIT-1 and IFIT-5, which can result in elevated cytokine levels including type I interferon. Components of the innate immune system such as IFIT-1 and IFIT-5 may also compete with eIF4E for binding of an mRNA with a cap other than Cap1 or Cap2, potentially inhibiting translation of the mRNA.

[0825] A cap can be included co-transcriptionally. For example, ARCA (anti-reverse cap analog; Thermo Fisher Scientific Cat. No. AM8045) is a cap analog comprising a 7-methylguanine 3′-methoxy-5′-triphosphate linked to the 5′ position of a guanine ribonucleotide which can be incorporated in vitro into a transcript at initiation. ARCA results in a Cap0 cap in which the 2′ position of the first cap-proximal nucleotide is hydroxyl. See, e.g., Stepinski et al. (2001) RNA 7:1486-1495, herein incorporated by reference in its entirety for all purposes.

[0826] CleanCap™ AG (m7G(5′)ppp(5′)(2′OMeA)pG; TriLink Biotechnologies Cat. No. N-7113) or CleanCap™ GG (m7G(5′)ppp(5′)(2′OMeG)pG; TriLink Biotechnologies Cat. No. N-7133) can be used to provide a Cap1 structure co-transcriptionally. 3′-O-methylated versions of CleanCap™ AG and CleanCap™ GG are also available from TriLink Biotechnologies as Cat. Nos. N-7413 and N-7433, respectively.

[0827] Alternatively, a cap can be added to an RNA post-transcriptionally. For example, Vaccinia capping enzyme is commercially available (New England Biolabs Cat. No. M2080S) and has RNA triphosphatase and guanylyltransferase activities, provided by its D1 subunit, and guanine methyltransferase, provided by its D12 subunit. As such, it can add a 7-methylguanine to an RNA, so as to give Cap0, in the presence of S-adenosyl methionine and GTP. See, e.g., Guo and Moss (1990) Proc. Natl. Acad. Sci. U.S.A. 87:4023-4027 and Mao and Shuman (1994) J. Biol. Chem. 269:24472-24479, each of which is herein incorporated by reference in its entirety for all purposes.

[0828] Cas mRNAs can further comprise a poly-adenylated (poly-A or poly(A) or poly-adenine) tail. The poly-A tail can, for example, comprise at least 20, at least 30, at least 40, at least 50, at least 60, at least 70, at least 80, at least 90, or at least 100 adenines, and optionally up to 300 adenines. For example, the poly-A tail can comprise 95, 96, 97, 98, 99, or 100 adenine nucleotides.

### C. Guide RNAs

[0829] A “guide RNA” or “gRNA” is an RNA molecule that binds to a Cas protein (e.g., Cas9 protein) and targets the Cas protein to a specific location within a target DNA. Guide RNAs can comprise two segments: a “DNA-targeting segment” (also called “guide sequence”) and a “protein-binding segment.” “Segment” includes a section or region of a molecule, such as a contiguous stretch of nucleotides in an RNA. Some gRNAs, such as those for Cas9, can comprise two separate RNA molecules: an “activator-RNA” (e.g., tracrRNA) and a “targeter-RNA” (e.g., CRISPR RNA or crRNA). Other gRNAs are a single RNA molecule (single RNA polynucleotide), which can also be called a “single-molecule gRNA,” a “single-guide RNA,” or an “sgRNA.” See, e.g., WO 2013/176772, WO 2014/065596, WO 2014/089290, WO 2014/093622, WO 2014/099750, WO 2013/142578, and WO 2014/131833, each of which is herein incorporated by reference in its entirety for all purposes. A guide RNA can refer to either a CRISPR RNA (crRNA) or the combination of a crRNA and a trans-activating CRISPR RNA (tracrRNA). The crRNA and tracrRNA can be associated as a single RNA molecule (single guide RNA or sgRNA) or in two separate RNA molecules (dual guide RNA or dgRNA). For Cas9, for example, a single-guide RNA can comprise a crRNA fused to a tracrRNA (e.g., via a linker). For Cpf1 and CasΦ, for example, only a crRNA is needed to achieve binding to a target sequence. The terms “guide RNA” and “gRNA” include both double-molecule (i.e., modular) gRNAs and single-molecule gRNAs. In some of the methods and compositions disclosed herein, a gRNA is a S. pyogenes Cas9 gRNA or an equivalent thereof. In some of the methods and compositions disclosed herein, a gRNA is a S. aureus Cas9 gRNA or an equivalent thereof.

[0830] An exemplary two-molecule gRNA comprises a crRNA-like (“CRISPR RNA” or “targeter-RNA” or “crRNA” or “crRNA repeat”) molecule and a corresponding tracrRNA-like (“trans-activating CRISPR RNA” or “activator-RNA” or “tracrRNA”) molecule. A crRNA comprises both the DNA-targeting segment (single-stranded) of the gRNA and a stretch of nucleotides that forms one half of the dsRNA duplex of the protein-binding segment of the gRNA. An example of a crRNA tail (e.g., for use with S. pyogenes Cas9), located downstream (3′) of the DNA-targeting segment, comprises, consists essentially of, or consists of GUUUUAGAGCUAUGCU (SEQ ID NO: 139) or GUUUUAGAGCUAUGCUGUUUUG (SEQ ID NO: 140). Any of the DNA-targeting segments disclosed herein can be joined to the 5′ end of SEQ ID NO: 139 or 140 to form a crRNA.

[0831] A corresponding tracrRNA (activator-RNA) comprises a stretch of nucleotides that forms the other half of the dsRNA duplex of the protein-binding segment of the gRNA. A stretch of nucleotides of a crRNA are complementary to and hybridize with a stretch of nucleotides of a tracrRNA to form the dsRNA duplex of the protein-binding domain of the gRNA. As such, each crRNA can be said to have a corresponding tracrRNA. Examples of tracrRNA sequences (e.g., for use with S. pyogenes Cas9) comprise, consist essentially of, or consist of any one of AGCAUAGCAAGUUAAAAUAAGGCUAGUCCGUUAUCAACUUGAAAAAGUGGCACC GAGUCGGUGCUUU (SEQ ID NO: 141), AAACAGCAUAGCAAGUUAAAAUAAGGCUAGUCCGUUAUCAACUUGAAAAAGUGG CACCGAGUCGGUGCUUUU (SEQ ID NO: 142), or GUUGGAACCAUUCAAAACAGCAUAGCAAGUUAAAAUAAGGCUAGUCCGUUAUCA ACUUGAAAAAGUGGCACCGAGUCGGUGC (SEQ ID NO: 143).

[0832] In systems in which both a crRNA and a tracrRNA are needed, the crRNA and the corresponding tracrRNA hybridize to form a gRNA. In systems in which only a crRNA is needed, the crRNA can be the gRNA. The crRNA additionally provides the single-stranded DNA-targeting segment that hybridizes to the complementary strand of a target DNA. If used for modification within a cell, the exact sequence of a given crRNA or tracrRNA molecule can be designed to be specific to the species in which the RNA molecules will be used. See, e.g., Mali et al. (2013) Science 339(6121):823-826; Jinek et al. (2012) Science 337(6096):816-821; Hwang et al. (2013) Nat. Biotechnol. 31(3):227-229; Jiang et al. (2013) Nat. Biotechnol. 31(3):233-239; and Cong et al. (2013) Science 339(6121):819-823, each of which is herein incorporated by reference in its entirety for all purposes.

[0833] The DNA-targeting segment (crRNA) of a given gRNA comprises a nucleotide sequence that is complementary to a sequence on the complementary strand of the target DNA, as described in more detail below. The DNA-targeting segment of a gRNA interacts with the target DNA in a sequence-specific manner via hybridization (i.e., base pairing). As such, the nucleotide sequence of the DNA-targeting segment may vary and determines the location within the target DNA with which the gRNA and the target DNA will interact. The DNA-targeting segment of a subject gRNA can be modified to hybridize to any desired sequence within a target DNA. Naturally occurring crRNAs differ depending on the CRISPR/Cas system and organism but often contain a targeting segment of between 21 to 72 nucleotides length, flanked by two direct repeats (DR) of a length of between 21 to 46 nucleotides (see, e.g., WO 2014/131833, herein incorporated by reference in its entirety for all purposes). In the case of S. pyogenes, the DRs are 36 nucleotides long and the targeting segment is 30 nucleotides long. The 3′ located DR is complementary to and hybridizes with the corresponding tracrRNA, which in turn binds to the Cas protein.

[0834] The DNA-targeting segment can have, for example, a length of at least about 12, at least about 15, at least about 17, at least about 18, at least about 19, at least about 20, at least about 25, at least about 30, at least about 35, or at least about 40 nucleotides. Such DNA-targeting segments can have, for example, a length from about 12 to about 100, from about 12 to about 80, from about 12 to about 50, from about 12 to about 40, from about 12 to about 30, from about 12 to about 25, or from about 12 to about 20 nucleotides. For example, the DNA targeting segment can be from about 15 to about 25 nucleotides (e.g., from about 17 to about 20 nucleotides, or about 17, 18, 19, or 20 nucleotides). See, e.g., US 2016/0024523, herein incorporated by reference in its entirety for all purposes. For Cas9 from S. pyogenes, a typical DNA-targeting segment is between 16 and 20 nucleotides in length or between 17 and 20 nucleotides in length. For Cas9 from S. aureus, a typical DNA-targeting segment is between 21 and 23 nucleotides in length. For Cpf1, a typical DNA-targeting segment is at least 16 nucleotides in length or at least 18 nucleotides in length.

[0835] In one example, the DNA-targeting segment can be about 20 nucleotides in length. However, shorter and longer sequences can also be used for the targeting segment (e.g., 15-25 nucleotides in length, such as 15, 16, 17, 18, 19, 20, 21, 22, 23, 24, or 25 nucleotides in length). The degree of identity between the DNA-targeting segment and the corresponding guide RNA target sequence (or degree of complementarity between the DNA-targeting segment and the other strand of the guide RNA target sequence) can be, for example, about 75%, about 80%, about 85%, about 90%, about 95%, or 100%. The DNA-targeting segment and the corresponding guide RNA target sequence can contain one or more mismatches. For example, the DNA-targeting segment of the guide RNA and the corresponding guide RNA target sequence can contain 1-4, 1-3, 1-2, 1, 2, 3, or 4 mismatches (e.g., where the total length of the guide RNA target sequence is at least 17, at least 18, at least 19, or at least 20 or more nucleotides). For example, the DNA-targeting segment of the guide RNA and the corresponding guide RNA target sequence can contain 1-4, 1-3, 1-2, 1, 2, 3, or 4 mismatches where the total length of the guide RNA target sequence 20 nucleotides.

[0836] As one example, a guide RNA targeting intron 1 of a human ALB gene can comprise a DNA-targeting segment (i.e., guide sequence) comprising, consisting essentially of, or consisting of the sequence (DNA-targeting segment) set forth in any one of SEQ ID NOS: 153-184. Alternatively, a guide RNA targeting intron 1 of a human ALB gene can comprise a DNA-targeting segment comprising, consisting essentially of, or consisting of at least 17, at least 18, at least 19, or at least 20 contiguous nucleotides of the sequence (DNA-targeting segment) set forth in any one of SEQ ID NOS: 153-184. Alternatively, a guide RNA targeting intron 1 of a human ALB gene can comprise a DNA-targeting segment that is at least 75%, at least 80%, at least 85%, at least 90%, or at least 95% identical to the sequence (DNA-targeting segment) set forth in any one of SEQ ID NOS: 153-184. Alternatively, a guide RNA targeting intron 1 of a human ALB gene can comprise a DNA-targeting segment that is at least 90% or at least 95% identical to the sequence (DNA-targeting segment) set forth in any one of SEQ ID NOS: 153-184. Alternatively, a guide RNA targeting intron 1 of a human ALB gene can comprise a DNA-targeting segment that is at least 75%, at least 80%, at least 85%, at least 90%, or at least 95% identical to at least 17, at least 18, at least 19, or at least 20 contiguous nucleotides of the sequence (DNA-targeting segment) set forth in any one of SEQ ID NOS: 153-184. Alternatively, a guide RNA targeting intron 1 of a human ALB gene can comprise a DNA-targeting segment that is at least 90% or at least 95% identical to at least 17, at least 18, at least 19, or at least 20 contiguous nucleotides of the sequence (DNA-targeting segment) set forth in any one of SEQ ID NOS: 153-184. Alternatively, a guide RNA targeting intron 1 of a human ALB gene can comprise a DNA-targeting segment comprising, consisting essentially of, or consisting of a sequence that differs by no more than 3, no more than 2, or no more than 1 nucleotide from the sequence (DNA-targeting segment) set forth in any one of SEQ ID NOS: 153-184. Alternatively, a guide RNA targeting intron 1 of a human ALB gene can comprise a DNA-targeting segment comprising, consisting essentially of, or consisting of a sequence that differs by no more than 3, no more than 2, or no more than 1 nucleotide from at least 17, at least 18, at least 19, or at least 20 contiguous nucleotides of the sequence (DNA-targeting segment) set forth in any one of SEQ ID NOS: 153-184.

[0837] As another example, a guide RNA targeting intron 1 of a human ALB gene can comprise a DNA-targeting segment (i.e., guide sequence) comprising, consisting essentially of, or consisting of the sequence (DNA-targeting segment) set forth in any one of SEQ ID NOS: 159, 153, 156, and 164. Alternatively, a guide RNA targeting intron 1 of a human ALB gene can comprise a DNA-targeting segment comprising, consisting essentially of, or consisting of at least 17, at least 18, at least 19, or at least 20 contiguous nucleotides of the sequence (DNA-targeting segment) set forth in any one of SEQ ID NOS: 159, 153, 156, and 164. Alternatively, a guide RNA targeting intron 1 of a human ALB gene can comprise a DNA-targeting segment that is at least 75%, at least 80%, at least 85%, at least 90%, or at least 95% identical to the sequence (DNA-targeting segment) set forth in any one of SEQ ID NOS: 159, 153, 156, and 164. Alternatively, a guide RNA targeting intron 1 of a human ALB gene can comprise a DNA-targeting segment that is at least 90% or at least 95% identical to the sequence (DNA-targeting segment) set forth in any one of SEQ ID NOS: 159, 153, 156, and 164. Alternatively, a guide RNA targeting intron 1 of a human ALB gene can comprise a DNA-targeting segment that is at least 75%, at least 80%, at least 85%, at least 90%, or at least 95% identical to at least 17, at least 18, at least 19, or at least 20 contiguous nucleotides of the sequence (DNA-targeting segment) set forth in any one of SEQ ID NOS: 159, 153, 156, and 164. Alternatively, a guide RNA targeting intron 1 of a human ALB gene can comprise a DNA-targeting segment that is at least 90% or at least 95% identical to at least 17, at least 18, at least 19, or at least 20 contiguous nucleotides of the sequence (DNA-targeting segment) set forth in any one of SEQ ID NOS: 159, 153, 156, and 164. Alternatively, a guide RNA targeting intron 1 of a human ALB gene can comprise a DNA-targeting segment comprising, consisting essentially of, or consisting of a sequence that differs by no more than 3, no more than 2, or no more than 1 nucleotide from the sequence (DNA-targeting segment) set forth in any one of SEQ ID NOS: 159, 153, 156, and 164. Alternatively, a guide RNA targeting intron 1 of a human ALB gene can comprise a DNA-targeting segment comprising, consisting essentially of, or consisting of a sequence that differs by no more than 3, no more than 2, or no more than 1 nucleotide from at least 17, at least 18, at least 19, or at least 20 contiguous nucleotides of the sequence (DNA-targeting segment) set forth in any one of SEQ ID NOS: 159, 153, 156, and 164.

[0838] As another example, a guide RNA targeting intron 1 of a human ALB gene can comprise a DNA-targeting segment (i.e., guide sequence) comprising, consisting essentially of, or consisting of the sequence (DNA-targeting segment) set forth in SEQ ID NO: 159. Alternatively, a guide RNA targeting intron 1 of a human ALB gene can comprise a DNA-targeting segment comprising, consisting essentially of, or consisting of at least 17, at least 18, at least 19, or at least 20 contiguous nucleotides of the sequence (DNA-targeting segment) set forth in SEQ ID NO: 159. Alternatively, a guide RNA targeting intron 1 of a human ALB gene can comprise a DNA-targeting segment that is at least 75%, at least 80%, at least 85%, at least 90%, or at least 95% identical to the sequence (DNA-targeting segment) set forth in SEQ ID NO: 159. Alternatively, a guide RNA targeting intron 1 of a human ALB gene can comprise a DNA-targeting segment that is at least 90% or at least 95% identical to the sequence (DNA-targeting segment) set forth in SEQ ID NO: 159. Alternatively, a guide RNA targeting intron 1 of a human ALB gene can comprise a DNA-targeting segment that is at least 75%, at least 80%, at least 85%, at least 90%, or at least 95% identical to at least 17, at least 18, at least 19, or at least 20 contiguous nucleotides of the sequence (DNA-targeting segment) set forth in SEQ ID NO: 159. Alternatively, a guide RNA targeting intron 1 of a human ALB gene can comprise a DNA-targeting segment that is at least 90% or at least 95% identical to at least 17, at least 18, at least 19, or at least 20 contiguous nucleotides of the sequence (DNA-targeting segment) set forth in SEQ ID NO: 159. Alternatively, a guide RNA targeting intron 1 of a human ALB gene can comprise a DNA-targeting segment comprising, consisting essentially of, or consisting of a sequence that differs by no more than 3, no more than 2, or no more than 1 nucleotide from the sequence (DNA-targeting segment) set forth in SEQ ID NO: 159. Alternatively, a guide RNA targeting intron 1 of a human ALB gene can comprise a DNA-targeting segment comprising, consisting essentially of, or consisting of a sequence that differs by no more than 3, no more than 2, or no more than 1 nucleotide from at least 17, at least 18, at least 19, or at least 20 contiguous nucleotides of the sequence (DNA-targeting segment) set forth in SEQ ID NO: 159.

[0839] As another example, a guide RNA targeting intron 1 of a human ALB gene can comprise a DNA-targeting segment (i.e., guide sequence) comprising, consisting essentially of, or consisting of the sequence (DNA-targeting segment) set forth in SEQ ID NO: 153. Alternatively, a guide RNA targeting intron 1 of a human ALB gene can comprise a DNA-targeting segment comprising, consisting essentially of, or consisting of at least 17, at least 18, at least 19, or at least 20 contiguous nucleotides of the sequence (DNA-targeting segment) set forth in SEQ ID NO: 153. Alternatively, a guide RNA targeting intron 1 of a human ALB gene can comprise a DNA-targeting segment that is at least 75%, at least 80%, at least 85%, at least 90%, or at least 95% identical to the sequence (DNA-targeting segment) set forth in SEQ ID NO: 153. Alternatively, a guide RNA targeting intron 1 of a human ALB gene can comprise a DNA-targeting segment that is at least 90% or at least 95% identical to the sequence (DNA-targeting segment) set forth in SEQ ID NO: 153. Alternatively, a guide RNA targeting intron 1 of a human ALB gene can comprise a DNA-targeting segment that is at least 75%, at least 80%, at least 85%, at least 90%, or at least 95% identical to at least 17, at least 18, at least 19, or at least 20 contiguous nucleotides of the sequence (DNA-targeting segment) set forth in SEQ ID NO: 153. Alternatively, a guide RNA targeting intron 1 of a human ALB gene can comprise a DNA-targeting segment that is at least 90% or at least 95% identical to at least 17, at least 18, at least 19, or at least 20 contiguous nucleotides of the sequence (DNA-targeting segment) set forth in SEQ ID NO: 153. Alternatively, a guide RNA targeting intron 1 of a human ALB gene can comprise a DNA-targeting segment comprising, consisting essentially of, or consisting of a sequence that differs by no more than 3, no more than 2, or no more than 1 nucleotide from the sequence (DNA-targeting segment) set forth in SEQ ID NO: 153. Alternatively, a guide RNA targeting intron 1 of a human ALB gene can comprise a DNA-targeting segment comprising, consisting essentially of, or consisting of a sequence that differs by no more than 3, no more than 2, or no more than 1 nucleotide from at least 17, at least 18, at least 19, or at least 20 contiguous nucleotides of the sequence (DNA-targeting segment) set forth in SEQ ID NO: 153.

[0840] As another example, a guide RNA targeting intron 1 of a human ALB gene can comprise a DNA-targeting segment (i.e., guide sequence) comprising, consisting essentially of, or consisting of the sequence (DNA-targeting segment) set forth in SEQ ID NO: 156. Alternatively, a guide RNA targeting intron 1 of a human ALB gene can comprise a DNA-targeting segment comprising, consisting essentially of, or consisting of at least 17, at least 18, at least 19, or at least 20 contiguous nucleotides of the sequence (DNA-targeting segment) set forth in SEQ ID NO: 156. Alternatively, a guide RNA targeting intron 1 of a human ALB gene can comprise a DNA-targeting segment that is at least 75%, at least 80%, at least 85%, at least 90%, or at least 95% identical to the sequence (DNA-targeting segment) set forth in SEQ ID NO: 156. Alternatively, a guide RNA targeting intron 1 of a human ALB gene can comprise a DNA-targeting segment that is at least 90% or at least 95% identical to the sequence (DNA-targeting segment) set forth in SEQ ID NO: 156. Alternatively, a guide RNA targeting intron 1 of a human ALB gene can comprise a DNA-targeting segment that is at least 75%, at least 80%, at least 85%, at least 90%, or at least 95% identical to at least 17, at least 18, at least 19, or at least 20 contiguous nucleotides of the sequence (DNA-targeting segment) set forth in SEQ ID NO: 156. Alternatively, a guide RNA targeting intron 1 of a human ALB gene can comprise a DNA-targeting segment that is at least 90% or at least 95% identical to at least 17, at least 18, at least 19, or at least 20 contiguous nucleotides of the sequence (DNA-targeting segment) set forth in SEQ ID NO: 156. Alternatively, a guide RNA targeting intron 1 of a human ALB gene can comprise a DNA-targeting segment comprising, consisting essentially of, or consisting of a sequence that differs by no more than 3, no more than 2, or no more than 1 nucleotide from the sequence (DNA-targeting segment) set forth in SEQ ID NO: 156. Alternatively, a guide RNA targeting intron 1 of a human ALB gene can comprise a DNA-targeting segment comprising, consisting essentially of, or consisting of a sequence that differs by no more than 3, no more than 2, or no more than 1 nucleotide from at least 17, at least 18, at least 19, or at least 20 contiguous nucleotides of the sequence (DNA-targeting segment) set forth in SEQ ID NO: 156.

[0841] As another example, a guide RNA targeting intron 1 of a human ALB gene can comprise a DNA-targeting segment (i.e., guide sequence) comprising, consisting essentially of, or consisting of the sequence (DNA-targeting segment) set forth in SEQ ID NO: 164. Alternatively, a guide RNA targeting intron 1 of a human ALB gene can comprise a DNA-targeting segment comprising, consisting essentially of, or consisting of at least 17, at least 18, at least 19, or at least 20 contiguous nucleotides of the sequence (DNA-targeting segment) set forth in SEQ ID NO: 164. Alternatively, a guide RNA targeting intron 1 of a human ALB gene can comprise a DNA-targeting segment that is at least 75%, at least 80%, at least 85%, at least 90%, or at least 95% identical to the sequence (DNA-targeting segment) set forth in SEQ ID NO: 164. Alternatively, a guide RNA targeting intron 1 of a human ALB gene can comprise a DNA-targeting segment that is at least 90% or at least 95% identical to the sequence (DNA-targeting segment) set forth in SEQ ID NO: 164. Alternatively, a guide RNA targeting intron 1 of a human ALB gene can comprise a DNA-targeting segment that is at least 75%, at least 80%, at least 85%, at least 90%, or at least 95% identical to at least 17, at least 18, at least 19, or at least 20 contiguous nucleotides of the sequence (DNA-targeting segment) set forth in SEQ ID NO: 164. Alternatively, a guide RNA targeting intron 1 of a human ALB gene can comprise a DNA-targeting segment that is at least 90% or at least 95% identical to at least 17, at least 18, at least 19, or at least 20 contiguous nucleotides of the sequence (DNA-targeting segment) set forth in SEQ ID NO: 164. Alternatively, a guide RNA targeting intron 1 of a human ALB gene can comprise a DNA-targeting segment comprising, consisting essentially of, or consisting of a sequence that differs by no more than 3, no more than 2, or no more than 1 nucleotide from the sequence (DNA-targeting segment) set forth in SEQ ID NO: 164. Alternatively, a guide RNA targeting intron 1 of a human ALB gene can comprise a DNA-targeting segment comprising, consisting essentially of, or consisting of a sequence that differs by no more than 3, no more than 2, or no more than 1 nucleotide from at least 17, at least 18, at least 19, or at least 20 contiguous nucleotides of the sequence (DNA-targeting segment) set forth in SEQ ID NO: 164.

TABLE 4
Human ALB Intron 1 Guide RNAs.

| Guide | SEQ ID NO (DNA- | SEQ ID NO | SEQ ID NO | SEQ ID NO (Guide RNA |
|---|---|---|---|---|
| RNA | Targeting Segment) | (Unmodified sgRNA) | (Modified sgRNA) | Target Sequence) |
| G009844 | 153 | 185 | 217 | 249 |
| G009851 | 154 | 186 | 218 | 250 |
| G009852 | 155 | 187 | 219 | 251 |
| G009857 | 156 | 188 | 220 | 252 |
| G009858 | 157 | 189 | 221 | 253 |
| G009859 | 158 | 190 | 222 | 254 |
| G009860 | 159 | 191 | 223 | 255 |
| G009861 | 160 | 192 | 224 | 256 |
| G009866 | 161 | 193 | 225 | 257 |
| G009867 | 162 | 194 | 226 | 258 |
| G009868 | 163 | 195 | 227 | 259 |
| G009874 | 164 | 196 | 228 | 260 |
| G012747 | 165 | 197 | 229 | 261 |
| G012748 | 166 | 198 | 230 | 262 |
| G012749 | 167 | 199 | 231 | 263 |
| G012750 | 168 | 200 | 232 | 264 |
| G012751 | 169 | 201 | 233 | 265 |
| G012752 | 170 | 202 | 234 | 266 |
| G012753 | 171 | 203 | 235 | 267 |
| G012754 | 172 | 204 | 236 | 268 |
| G012755 | 173 | 205 | 237 | 269 |
| G012756 | 174 | 206 | 238 | 270 |
| G012757 | 175 | 207 | 239 | 271 |
| G012758 | 176 | 208 | 240 | 272 |
| G012759 | 177 | 209 | 241 | 273 |
| G012760 | 178 | 210 | 242 | 274 |
| G012761 | 179 | 211 | 243 | 275 |
| G012762 | 180 | 212 | 244 | 276 |
| G012763 | 181 | 213 | 245 | 277 |
| G012764 | 182 | 214 | 246 | 278 |
| G012765 | 183 | 215 | 247 | 279 |
| G012766 | 184 | 216 | 248 | 280 |

TABLE 5
Human ALB Intron 1 Guide Sequences.

| Guide Sequence | SEQ ID NO: |
|---|---|
| GAGCAACCUCACUCUUGUCU | 153 |
| AUGCAUUUGUUUCAAAAUAU | 154 |
| UGCAUUUGUUUCAAAAUAUU | 155 |
| AUUUAUGAGAUCAACAGCAC | 156 |
| GAUCAACAGCACAGGUUUUG | 157 |
| UUAAAUAAAGCAUAGUGCAA | 158 |
| UAAAGCAUAGUGCAAUGGAU | 159 |
| UAGUGCAAUGGAUAGGUCUU | 160 |
| UACUAAAACUUUAUUUUACU | 161 |
| AAAGUUGAACAAUAGAAAAA | 162 |
| AAUGCAUAAUCUAAGUCAAA | 163 |
| UAAUAAAAUUCAAACAUCCU | 164 |
| GCAUCUUUAAAGAAUUAUUU | 165 |
| UUUGGCAUUUAUUUCUAAAA | 166 |
| UGUAUUUGUGAAGUCUUACA | 167 |
| UCCUAGGUAAAAAAAAAAAA | 168 |
| UAAUUUUCUUUUGCGCACUA | 169 |
| UGACUGAAACUUCACAGAAU | 170 |
| GACUGAAACUUCACAGAAUA | 171 |
| UUCAUUUUAGUCUGUCUUCU | 172 |
| AUUAUCUAAGUUUGAAUAUA | 173 |
| AAUUUUUAAAAUAGUAUUCU | 174 |
| UGAAUUAUUCUUCUGUUUAA | 175 |
| AUCAUCCUGAGUUUUUCUGU | 176 |
| UUACUAAAACUUUAUUUUAC | 177 |
| ACCUUUUUUUUUUUUUACCU | 178 |
| AGUGCAAUGGAUAGGUCUUU | 179 |
| UGAUUCCUACAGAAAAACUC | 180 |
| UGGGCAAGGGAAGAAAAAAA | 181 |
| CCUCACUCUUGUCUGGGCAA | 182 |
| ACCUCACUCUUGUCUGGGCA | 183 |
| UGAGCAACCUCACUCUUGUC | 184 |

TABLE 6
Human ALB Intron 1 sgRNA Sequences.

| Full Sequence | Full Sequence Modified |
|---|---|
| GAGCAACCUCACUCUUGUCUGUUUUAG | mG*mA*mG*CAACCUCACUCUUGUCUGUUUUAGAmGmCmUmA |
| AGCUAGAAAUAGCAAGUUAAAAUAAG | mGmAmAmAmUmAmGmCAAGUUAAAAUAAGGCUAGUCCGUUA |
| GCUAGUCCGUUAUCAACUUGAAAAAGU | UCAmAmCmUmUmGmAmAmAmAmAmGmUmGmGmCmAmCmCm |
| GGCACCGAGUCGGUGCUUUU | GmAmGmUmCmGmGmUmGmCmU*mU*mU*mU (SEQ ID NO: 217) |
| (SEQ ID NO: 185) | |
| AUGCAUUUGUUUCAAAAUAUGUUUUAG | mA*mU*mG*CAUUUGUUUCAAAAUAUGUUUUAGAmGmCmUmA |
| AGCUAGAAAUAGCAAGUUAAAAUAAGG | mGmAmAmAmUmAmGmCAAGUUAAAAUAAGGCUAGUCCGUUA |
| CUAGUCCGUUAUCAACUUGAAAAAGUG | UCAmAmCmUmUmGmAmAmAmAmAmGmUmGmGmCmAmCmCm |
| GCACCGAGUCGGUGCUUUU | GmAmGmUmCmGmGmUmGmCmU*mU*mU*mU (SEQ ID NO: 218) |
| (SEQ ID NO: 186) | |
| UGCAUUUGUUUCAAAAUAUUGUUUUAG | mUmG*mC*AUUUGUUUCAAAAUAUUGUUUUAGAmGmCmUmA |
| AGCUAGAAAUAGCAAGUUAAAAUAAGG | mGmAmAmAmUmAmGmCAAGUUAAAAUAAGGCUAGUCCGUUA |
| CUAGUCCGUUAUCAACUUGAAAAAGUG | UCAmAmCmUmUmGmAmAmAmAmAmGmUmGmGmCmAmCmCm |
| GCACCGAGUCGGUGCUUUU | GmAmGmUmCmGmGmUmGmCmU*mU*mU*mU (SEQ ID NO: 219) |
| (SEQ ID NO: 187) | |
| AUUUAUGAGAUCAACAGCACGUUUUAG | mA*mU*mU*UAUGAGAUCAACAGCACGUUUUAGAmGmCmUmA |
| AGCUAGAAAUAGCAAGUUAAAAUAAGG | mGmAmAmAmUmAmGmCAAGUUAAAAUAAGGCUAGUCCGUUA |
| CUAGUCCGUUAUCAACUUGAAAAAGUG | UCAmAmCmUmUmGmAmAmAmAmAmGmUmGmGmCmAmCmCm |
| GCACCGAGUCGGUGCUUUU | GmAmGmUmCmGmGmUmGmCmU*mU*mU*mU (SEQ ID NO: 220) |
| (SEQ ID NO: 188) | |
| GAUCAACAGCACAGGUUUUGGUUUUAG | mG*mA*mU*CAACAGCACAGGUUUUGGUUUUAGAmGmCmUmA |
| AGCUAGAAAUAGCAAGUUAAAAUAAGG | mGmAmAmAmUmAmGmCAAGUUAAAAUAAGGCUAGUCCGUUA |
| CUAGUCCGUUAUCAACUUGAAAAAGUG | UCAmAmCmUmUmGmAmAmAmAmAmGmUmGmGmCmAmCmCm |
| GCACCGAGUCGGUGCUUUU | GmAmGmUmCmGmGmUmGmCmU*mU*mU*mU (SEQ ID NO: 221) |
| (SEQ ID NO: 189) | |
| UUAAAUAAAGCAUAGUGCAAGUUUUAG | mU*mU*mA*AAUAAAGCAUAGUGCAAGUUUUAGAmGmCmUmA |
| AGCUAGAAAUAGCAAGUUAAAAUAAGG | mGmAmAmAmUmAmGmCAAGUUAAAAUAAGGCUAGUCCGUUA |
| CUAGUCCGUUAUCAACUUGAAAAAGUG | UCAmAmCmUmUmGmAmAmAmAmAmGmUmGmGmCmAmCmCm |
| GCACCGAGUCGGUGCUUUU | GmAmGmUmCmGmGmUmGmCmU*mU*mU*mU (SEQ ID NO: 222) |
| (SEQ ID NO: 190) | |
| UAAAGCAUAGUGCAAUGGAUGUUUUAG | mU*mA*mA*AGCAUAGUGCAAUGGAUGUUUUAGAmGmCmUmA |
| AGCUAGAAAUAGCAAGUUAAAAUAAGG | mGmAmAmAmUmAmGmCAAGUUAAAAUAAGGCUAGUCCGUUA |
| CUAGUCCGUUAUCAACUUGAAAAAGUG | UCAmAmCmUmUmGmAmAmAmAmAmGmUmGmGmCmAmCmCm |
| GCACCGAGUCGGUGCUUUU | GmAmGmUmCmGmGmUmGmCmU*mU*mU*mU (SEQ ID NO: 223) |
| (SEQ ID NO: 191) | |
| UAGUGCAAUGGAUAGGUCUUGUUUUAG | mU*mA*mG*UGCAAUGGAUAGGUCUUGUUUUAGAmGmCmUmA |
| AGCUAGAAAUAGCAAGUUAAAAUAAGG | mGmAmAmAmUmAmGmCAAGUUAAAAUAAGGCUAGUCCGUUA |
| CUAGUCCGUUAUCAACUUGAAAAAGUG | UCAmAmCmUmUmGmAmAmAmAmAmGmUmGmGmCmAmCmCm |
| GCACCGAGUCGGUGCUUUU | GmAmGmUmCmGmGmUmGmCmU*mU*mU*mU (SEQ ID NO: 224) |
| (SEQ ID NO: 192) | |
| UACUAAAACUUUAUUUUACUGUUUUAG | mU*mA*mC*UAAAACUUUAUUUUACUGUUUUAGAmGmCmUmA |
| AGCUAGAAAUAGCAAGUUAAAAUAAGG | mGmAmAmAmUmAmGmCAAGUUAAAAUAAGGCUAGUCCGUUA |
| CUAGUCCGUUAUCAACUUGAAAAAGUG | UCAmAmCmUmUmGmAmAmAmAmAmGmUmGmGmCmAmCmCm |
| GCACCGAGUCGGUGCUUUU | GmAmGmUmCmGmGmUmGmCmU*mU*mU*mU (SEQ ID NO: 225) |
| (SEQ ID NO: 193) | |
| AAAGUUGAACAAUAGAAAAAGUUUUA | mA*mA*mA*GUUGAACAAUAGAAAAAGUUUUAGAmGmCmUmA |
| GAGCUAGAAAUAGCAAGUUAAAAUAAG | mGmAmAmAmUmAmGmCAAGUUAAAAUAAGGCUAGUCCGUUA |
| GCUAGUCCGUUAUCAACUUGAAAAAGU | UCAmAmCmUmUmGmAmAmAmAmAmGmUmGmGmCmAmCmCm |
| GGCACCGAGUCGGUGCUUUU | GmAmGmUmCmGmGmUmGmCmU*mU*mU*mU (SEQ ID NO: 226) |
| (SEQ ID NO: 194) | |
| AAUGCAUAAUCUAAGUCAAAGUUUUAG | mA*mA*mU*GCAUAAUCUAAGUCAAAGUUUUAGAmGmCmUmA |
| AGCUAGAAAUAGCAAGUUAAAAUAAGG | mGmAmAmAmUmAmGmCAAGUUAAAAUAAGGCUAGUCCGUUA |
| CUAGUCCGUUAUCAACUUGAAAAAGUG | UCAmAmCmUmUmGmAmAmAmAmAmGmUmGmGmCmAmCmCm |
| GCACCGAGUCGGUGCUUUU | GmAmGmUmCmGmGmUmGmCmU*mU*mU*mU (SEQ ID NO: 227) |
| (SEQ ID NO: 195) | |
| UAAUAAAAUUCAAACAUCCUGUUUUAG | mU*mA*mA*UAAAAUUCAAACAUCCUGUUUUAGAmGmCmUmA |
| AGCUAGAAAUAGCAAGUUAAAAUAAGG | mGmAmAmAmUmAmGmCAAGUUAAAAUAAGGCUAGUCCGUUA |
| CUAGUCCGUUAUCAACUUGAAAAAGUG | UCAmAmCmUmUmGmAmAmAmAmAmGmUmGmGmCmAmCmCm |
| GCACCGAGUCGGUGCUUUU | GmAmGmUmCmGmGmUmGmCmU*mU*mU*mU (SEQ ID NO: 228) |
| (SEQ ID NO: 196) | |
| GCAUCUUUAAAGAAUUAUUUGUUUUAG | mG*mC*mA*UCUUUAAAGAAUUAUUUGUUUUAGAmGmCmUmA |
| AGCUAGAAAUAGCAAGUUAAAAUAAGG | mGmAmAmAmUmAmGmCAAGUUAAAAUAAGGCUAGUCCGUUA |
| CUAGUCCGUUAUCAACUUGAAAAAGUG | UCAmAmCmUmUmGmAmAmAmAmAmGmUmGmGmCmAmCmCm |
| GCACCGAGUCGGUGCUUUU | GmAmGmUmCmGmGmUmGmCmU*mU*mU*mU (SEQ ID NO: 229) |
| (SEQ ID NO: 197) | |
| UUUGGCAUUUAUUUCUAAAAGUUUUAG | mU*mU*mU*GGCAUUUAUUUCUAAAAGUUUUAGAmGmCmUmA |
| AGCUAGAAAUAGCAAGUUAAAAUAAGG | mGmAmAmAmUmAmGmCAAGUUAAAAUAAGGCUAGUCCGUUA |
| CUAGUCCGUUAUCAACUUGAAAAAGUG | UCAmAmCmUmUmGmAmAmAmAmAmGmUmGmGmCmAmCmCm |
| GCACCGAGUCGGUGCUUUU | GmAmGmUmCmGmGmUmGmCmU*mU*mU*mU (SEQ ID NO: 230) |
| (SEQ ID NO: 198) | |
| UGUAUUUGUGAAGUCUUACAGUUUUAG | mU*mG*mU*AUUUGUGAAGUCUUACAGUUUUAGAmGmCmUmA |
| AGCUAGAAAUAGCAAGUUAAAAUAAGG | mGmAmAmAmUmAmGmCAAGUUAAAAUAAGGCUAGUCCGUUA |
| CUAGUCCGUUAUCAACUUGAAAAAGUG | UCAmAmCmUmUmGmAmAmAmAmAmGmUmGmGmCmAmCmCm |
| GCACCGAGUCGGUGCUUUU | GmAmGmUmCmGmGmUmGmCmU*mU*mU*mU (SEQ ID NO: 231) |
| (SEQ ID NO: 199) | |
| UCCUAGGUAAAAAAAAAAAAGUUUUAG | mU*mC*mC*UAGGUAAAAAAAAAAAAGUUUUAGAmGmCmUmA |
| AGCUAGAAAUAGCAAGUUAAAAUAAGG | mGmAmAmAmUmAmGmCAAGUUAAAAUAAGGCUAGUCCGUUA |
| CUAGUCCGUUAUCAACUUGAAAAAGUG | UCAmAmCmUmUmGmAmAmAmAmAmGmUmGmGmCmAmCmCm |
| GCACCGAGUCGGUGCUUUU | GmAmGmUmCmGmGmUmGmCmU*mU*mU*mU (SEQ ID NO: 232) |
| (SEQ ID NO: 200) | |
| UAAUUUUCUUUUGCGCACUAGUUUUAG | mU*mA*mA*UUUUCUUUUGCGCACUAGUUUUAGAmGmCmUmA |
| AGCUAGAAAUAGCAAGUUAAAAUAAGG | mGmAmAmAmUmAmGmCAAGUUAAAAUAAGGCUAGUCCGUUA |
| CUAGUCCGUUAUCAACUUGAAAAAGUG | UCAmAmCmUmUmGmAmAmAmAmAmGmUmGmGmCmAmCmCm |
| GCACCGAGUCGGUGCUUUU | GmAmGmUmCmGmGmUmGmCmU*mU*mU*mU (SEQ ID NO: 233) |
| (SEQ ID NO: 201) | |
| UGACUGAAACUUCACAGAAUGUUUUAG | mU*mG*mA*CUGAAACUUCACAGAAUGUUUUAGAmGmCmUmA |
| AGCUAGAAAUAGCAAGUUAAAAUAAGG | mGmAmAmAmUmAmGmCAAGUUAAAAUAAGGCUAGUCCGUUA |
| CUAGUCCGUUAUCAACUUGAAAAAGUG | UCAmAmCmUmUmGmAmAmAmAmAmGmUmGmGmCmAmCmCm |
| GCACCGAGUCGGUGCUUUU | GmAmGmUmCmGmGmUmGmCmU*mU*mU*mU (SEQ ID NO: 234) |
| (SEQ ID NO: 202) | |
| GACUGAAACUUCACAGAAUAGUUUUAG | mG*mA*mC*UGAAACUUCACAGAAUAGUUUUAGAmGmCmUmA |
| AGCUAGAAAUAGCAAGUUAAAAUAAGG | mGmAmAmAmUmAmGmCAAGUUAAAAUAAGGCUAGUCCGUUA |
| CUAGUCCGUUAUCAACUUGAAAAAGUG | UCAmAmCmUmUmGmAmAmAmAmAmGmUmGmGmCmAmCmCm |
| GCACCGAGUCGGUGCUUUU | GmAmGmUmCmGmGmUmGmCmU*mU*mU*mU (SEQ ID NO: 235) |
| (SEQ ID NO: 203) | |
| UUCAUUUUAGUCUGUCUUCUGUUUUAG | mU*mU*mC*AUUUUAGUCUGUCUUCUGUUUUAGAmGmCmUmA |
| AGCUAGAAAUAGCAAGUUAAAAUAAGG | mGmAmAmAmUmAmGmCAAGUUAAAAUAAGGCUAGUCCGUUA |
| CUAGUCCGUUAUCAACUUGAAAAAGUG | UCAmAmCmUmUmGmAmAmAmAmAmGmUmGmGmCmAmCmCm |
| GCACCGAGUCGGUGCUUUU | GmAmGmUmCmGmGmUmGmCmU*mU*mU*mU (SEQ ID NO: 236) |
| (SEQ ID NO: 204) | |
| AUUAUCUAAGUUUGAAUAUAGUUUUA | mA*mU*mU*AUCUAAGUUUGAAUAUAGUUUUAGAmGmCmUmA |
| GAGCUAGAAAUAGCAAGUUAAAAUAAG | mGmAmAmAmUmAmGmCAAGUUAAAAUAAGGCUAGUCCGUUA |
| GCUAGUCCGUUAUCAACUUGAAAAAGU | UCAmAmCmUmUmGmAmAmAmAmAmGmUmGmGmCmAmCmCm |
| GGCACCGAGUCGGUGCUUUU | GmAmGmUmCmGmGmUmGmCmU*mU*mU*mU (SEQ ID NO: 237) |
| (SEQ ID NO: 205) | |
| AAUUUUUAAAAUAGUAUUCUGUUUUA | mA*mA*mU*UUUUAAAAUAGUAUUCUGUUUUAGAmGmCmUmA |
| GAGCUAGAAAUAGCAAGUUAAAAUAAG | mGmAmAmAmUmAmGmCAAGUUAAAAUAAGGCUAGUCCGUUA |
| GCUAGUCCGUUAUCAACUUGAAAAAGU | UCAmAmCmUmUmGmAmAmAmAmAmGmUmGmGmCmAmCmCm |
| GGCACCGAGUCGGUGCUUUU | GmAmGmUmCmGmGmUmGmCmU*mU*mU*mU (SEQ ID NO: 238) |
| (SEQ ID NO: 206) | |
| UGAAUUAUUCUUCUGUUUAAGUUUUAG | mU*mG*mA*AUUAUUCUUCUGUUUAAGUUUUAGAmGmCmUmA |
| AGCUAGAAAUAGCAAGUUAAAAUAAGG | mGmAmAmAmUmAmGmCAAGUUAAAAUAAGGCUAGUCCGUUA |
| CUAGUCCGUUAUCAACUUGAAAAAGUG | UCAmAmCmUmUmGmAmAmAmAmAmGmUmGmGmCmAmCmCm |
| GCACCGAGUCGGUGCUUUU | GmAmGmUmCmGmGmUmGmCmU*mU*mU*mU (SEQ ID NO: 239) |
| (SEQ ID NO: 207) | |
| AUCAUCCUGAGUUUUUCUGUGUUUUAG | mA*mU*mC*AUCCUGAGUUUUUCUGUGUUUUAGAmGmCmUmA |
| AGCUAGAAAUAGCAAGUUAAAAUAAGG | mGmAmAmAmUmAmGmCAAGUUAAAAUAAGGCUAGUCCGUUA |
| CUAGUCCGUUAUCAACUUGAAAAAGUG | UCAmAmCmUmUmGmAmAmAmAmAmGmUmGmGmCmAmCmCm |
| GCACCGAGUCGGUGCUUUU | GmAmGmUmCmGmGmUmGmCmU*mU*mU*mU (SEQ ID NO: 240) |
| (SEQ ID NO: 208) | |
| UUACUAAAACUUUAUUUUACGUUUUAG | mU*mU*mA*CUAAAACUUUAUUUUACGUUUUAGAmGmCmUmA |
| AGCUAGAAAUAGCAAGUUAAAAUAAGG | mGmAmAmAmUmAmGmCAAGUUAAAAUAAGGCUAGUCCGUUA |
| CUAGUCCGUUAUCAACUUGAAAAAGUG | UCAmAmCmUmUmGmAmAmAmAmAmGmUmGmGmCmAmCmCm |
| GCACCGAGUCGGUGCUUUU | GmAmGmUmCmGmGmUmGmCmU*mU*mU*mU (SEQ ID NO: 241) |
| (SEQ ID NO: 209) | |
| ACCUUUUUUUUUUUUUACCUGUUUUAG | mA*mC*mC*UUUUUUUUUUUUUACCUGUUUUAGAmGmCmUmA |
| AGCUAGAAAUAGCAAGUUAAAAUAAGG | mGmAmAmAmUmAmGmCAAGUUAAAAUAAGGCUAGUCCGUUA |
| CUAGUCCGUUAUCAACUUGAAAAAGUG | UCAmAmCmUmUmGmAmAmAmAmAmGmUmGmGmCmAmCmCm |
| GCACCGAGUCGGUGCUUUU | GmAmGmUmCmGmGmUmGmCmU*mU*mU*mU (SEQ ID NO: 242) |
| (SEQ ID NO: 210) | |
| AGUGCAAUGGAUAGGUCUUUGUUUUAG | mA*mG*mU*GCAAUGGAUAGGUCUUUGUUUUAGAmGmCmUmA |
| AGCUAGAAAUAGCAAGUUAAAAUAAGG | mGmAmAmAmUmAmGmCAAGUUAAAAUAAGGCUAGUCCGUUA |
| CUAGUCCGUUAUCAACUUGAAAAAGUG | UCAmAmCmUmUmGmAmAmAmAmAmGmUmGmGmCmAmCmCm |
| GCACCGAGUCGGUGCUUUU | GmAmGmUmCmGmGmUmGmCmU*mU*mU*mU (SEQ ID NO: 243) |
| (SEQ ID NO: 211) | |
| UGAUUCCUACAGAAAAACUCGUUUUAG | mU*mG*mA*UUCCUACAGAAAAACUCGUUUUAGAmGmCmUmA |
| AGCUAGAAAUAGCAAGUUAAAAUAAGG | mGmAmAmAmUmAmGmCAAGUUAAAAUAAGGCUAGUCCGUUA |
| CUAGUCCGUUAUCAACUUGAAAAAGUG | UCAmAmCmUmUmGmAmAmAmAmAmGmUmGmGmCmAmCmCm |
| GCACCGAGUCGGUGCUUUU | GmAmGmUmCmGmGmUmGmCmU*mU*mU*mU (SEQ ID NO: 244) |
| (SEQ ID NO: 212) | |
| UGGGCAAGGGAAGAAAAAAAGUUUUA | mU*mG*mG*GCAAGGGAAGAAAAAAAGUUUUAGAmGmCmUmA |
| GAGCUAGAAAUAGCAAGUUAAAAUAAG | mGmAmAmAmUmAmGmCAAGUUAAAAUAAGGCUAGUCCGUUA |
| GCUAGUCCGUUAUCAACUUGAAAAAGU | UCAmAmCmUmUmGmAmAmAmAmAmGmUmGmGmCmAmCmCm |
| GGCACCGAGUCGGUGCUUUU | GmAmGmUmCmGmGmUmGmCmU*mU*mU*mU (SEQ ID NO: 245) |
| (SEQ ID NO: 213) | |
| CCUCACUCUUGUCUGGGCAAGUUUUAG | mC*mC*mU*CACUCUUGUCUGGGCAAGUUUUAGAmGmCmUmA |
| AGCUAGAAAUAGCAAGUUAAAAUAAGG | mGmAmAmAmUmAmGmCAAGUUAAAAUAAGGCUAGUCCGUUA |
| CUAGUCCGUUAUCAACUUGAAAAAGUG | UCAmAmCmUmUmGmAmAmAmAmAmGmUmGmGmCmAmCmCm |
| GCACCGAGUCGGUGCUUUU | GmAmGmUmCmGmGmUmGmCmU*mU*mU*mU (SEQ ID NO: 246) |
| (SEQ ID NO: 214) | |
| ACCUCACUCUUGUCUGGGCAGUUUUAG | mA*mC*mC*UCACUCUUGUCUGGGCAGUUUUAGAmGmCmUmA |
| AGCUAGAAAUAGCAAGUUAAAAUAAGG | mGmAmAmAmUmAmGmCAAGUUAAAAUAAGGCUAGUCCGUUA |
| CUAGUCCGUUAUCAACUUGAAAAAGUG | UCAmAmCmUmUmGmAmAmAmAmAmGmUmGmGmCmAmCmCm |
| GCACCGAGUCGGUGCUUUU | GmAmGmUmCmGmGmUmGmCmU*mU*mU*mU (SEQ ID NO: 247) |
| (SEQ ID NO: 215) | |
| UGAGCAACCUCACUCUUGUCGUUUUAG | mU*mG*mA*GCAACCUCACUCUUGUCGUUUUAGAmGmCmUmA |
| AGCUAGAAAUAGCAAGUUAAAAUAAGG | mGmAmAmAmUmAmGmCAAGUUAAAAUAAGGCUAGUCCGUUA |
| CUAGUCCGUUAUCAACUUGAAAAAGUG | UCAmAmCmUmUmGmAmAmAmAmAmGmUmGmGmCmAmCmCm |
| GCACCGAGUCGGUGCUUUU | GmAmGmUmCmGmGmUmGmCmU*mU*mU*mU (SEQ ID NO: 248) |
| (SEQ ID NO: 216) | |

TABLE 7
Mouse Alb Intron 1 Guide Sequences.

| Guide Sequence | SEQ ID NO: |
|---|---|
| CACUCUUGUCUGUGGAAACA | 287 |

TABLE 8
Mouse Alb Intron 1 sgRNA Sequences.

| Full Sequence | Full Sequence Modified |
|---|---|
| CACUCUUGUCUGUGGAAACA | mC*mA*mC*UCUUGUCUGUG |
| GUUUUAGAGCUAGAAAUAGC | GAAACAGUUUUAGAmGmCmU |
| AAGUUAAAAUAAGGCUAGUC | mAmGmAmAmAmUmAmGmCAA |
| CGUUAUCAACUUGAAAAAGU | GUUAAAAUAAGGCUAGUCCG |
| GGCACCGAGUCGGUGCUUUU | UUAUCAmAmCmUmUmGmAmA |
| (SEQ ID NO: 289) | mAmAmAmGmUmGmGmCmAmC |
| | mCmGmAmGmUmCmGmGmUmG |
| | mCmU*mU*mU*mU |
| | (SEQ ID NO: 290) |

[0842] TracrRNAs can be in any form (e.g., full-length tracrRNAs or active partial tracrRNAs) and of varying lengths. They can include primary transcripts or processed forms. For example, tracrRNAs (as part of a single-guide RNA or as a separate molecule as part of a two-molecule gRNA) may comprise, consist essentially of, or consist of all or a portion of a wild type tracrRNA sequence (e.g., about or more than about 20, 26, 32, 45, 48, 54, 63, 67, 85, or more nucleotides of a wild type tracrRNA sequence). Examples of wild type tracrRNA sequences from S. pyogenes include 171-nucleotide, 89-nucleotide, 75-nucleotide, and 65-nucleotide versions. See, e.g., Deltcheva et al. (2011) Nature 471(7340):602-607; WO 2014/093661, each of which is herein incorporated by reference in its entirety for all purposes. Examples of tracrRNAs within single-guide RNAs (sgRNAs) include the tracrRNA segments found within +48, +54, +67, and +85 versions of sgRNAs, where “+n” indicates that up to the +n nucleotide of wild type tracrRNA is included in the sgRNA. See U.S. Pat. No. 8,697,359, herein incorporated by reference in its entirety for all purposes.

[0843] The percent complementarity between the DNA-targeting segment of the guide RNA and the complementary strand of the target DNA can be at least 60% (e.g., at least 65%, at least 70%, at least 75%, at least 80%, at least 85%, at least 90%, at least 95%, or 100%). The percent complementarity between the DNA-targeting segment and the complementary strand of the target DNA can be at least 60% over about 20 contiguous nucleotides. As an example, the percent complementarity between the DNA-targeting segment and the complementary strand of the target DNA can be 100% over the 14 contiguous nucleotides at the 5′ end of the complementary strand of the target DNA and as low as 0% over the remainder. In such a case, the DNA-targeting segment can be considered to be 14 nucleotides in length. As another example, the percent complementarity between the DNA-targeting segment and the complementary strand of the target DNA can be 100% over the seven contiguous nucleotides at the 5′ end of the complementary strand of the target DNA and as low as 0% over the remainder. In such a case, the DNA-targeting segment can be considered to be 7 nucleotides in length. In some guide RNAs, at least 17 nucleotides within the DNA-targeting segment are complementary to the complementary strand of the target DNA. For example, the DNA-targeting segment can be 20 nucleotides in length and can comprise 1, 2, or 3 mismatches with the complementary strand of the target DNA. In one example, the mismatches are not adjacent to the region of the complementary strand corresponding to the protospacer adjacent motif (PAM) sequence (i.e., the reverse complement of the PAM sequence) (e.g., the mismatches are in the 5′ end of the DNA-targeting segment of the guide RNA, or the mismatches are at least 2, 3, 4, 5, 6, 7, 8, 9, 10, 11, 12, 13, 14, 15, 16, 17, 18, or 19 base pairs away from the region of the complementary strand corresponding to the PAM sequence).

[0844] The protein-binding segment of a gRNA can comprise two stretches of nucleotides that are complementary to one another. The complementary nucleotides of the protein-binding segment hybridize to form a double-stranded RNA duplex (dsRNA). The protein-binding segment of a subject gRNA interacts with a Cas protein, and the gRNA directs the bound Cas protein to a specific nucleotide sequence within target DNA via the DNA-targeting segment.

[0845] Single-guide RNAs can comprise a DNA-targeting segment and a scaffold sequence (i.e., the protein-binding or Cas-binding sequence of the guide RNA). For example, such guide RNAs can have a 5′ DNA-targeting segment joined to a 3′ scaffold sequence. Exemplary scaffold sequences (e.g., for use with S. pyogenes Cas9) comprise, consist essentially of, or consist of:

(version 1; SEQ ID NO: 144)
GUUUUAGAGCUAGAAAUAGCAAGUUAAAAUAAGGCUAGUCCGUUA
UCAACUUGAAAAAGUGGCACCGAGUCGGUGCU;
(version 2; SEQ ID NO: 145)
GUUGGAACCAUUCAAAACAGCAUAGCAAGUUAAAAUAAGGCUAGU
CCGUUAUCAACUUGAAAAAGUGGCACCGAGUCGGUGC;
(version 3; SEQ ID NO: 146)
GUUUUAGAGCUAGAAAUAGCAAGUUAAAAUAAGGCUAGUCCGUUA
UCAACUUGAAAAAGUGGCACCGAGUCGGUGC;
and
(version 4; SEQ ID NO: 147)
GUUUAAGAGCUAUGCUGGAAACAGCAUAGCAAGUUUAAAUAAGGC
UAGUCCGUUAUCAACUUGAAAAAGUGGCACCGAGUCGGUGC;
(version 5; SEQ ID NO: 148)
GUUUUAGAGCUAGAAAUAGCAAGUUAAAAUAAGGCUAGUCCGUUA
UCAACUUGAAAAAGUGGCACCGAGUCGGUGCUUUUUUU;
(version 6; SEQ ID NO: 149)
GUUUUAGAGCUAGAAAUAGCAAGUUAAAAUAAGGCUAGUCCGUUA
UCAACUUGAAAAAGUGGCACCGAGUCGGUGCUUUU;
(version 7; SEQ ID NO: 150)
GUUUAAGAGCUAUGCUGGAAACAGCAUAGCAAGUUUAAAUAAGGC
UAGUCCGUUAUCAACUUGAAAAAGUGGCACCGAGUCGGUGCUUUU
UU;
or
(version 8; SEQ ID NO: 151)
GUUUUAGAGCUAGAAAUAGCAAGUUAAAAUAAGGCUAGUCCGUUA
UCAACUUGGCACCGAGUCGGUGC.

In some guide sgRNAs, the four terminal U residues of version 6 are not present. In some sgRNAs, only 1, 2, or 3 of the four terminal U residues of version 6 are present. Guide RNAs targeting any of the guide RNA target sequences disclosed herein can include, for example, a DNA-targeting segment on the 5′ end of the guide RNA fused to any of the exemplary guide RNA scaffold sequences on the 3′ end of the guide RNA. That is, any of the DNA-targeting segments disclosed herein can be joined to the 5′ end of any one of the above scaffold sequences to form a single guide RNA (chimeric guide RNA).

[0846] Guide RNAs can include modifications or sequences that provide for additional desirable features (e.g., modified or regulated stability; subcellular targeting; tracking with a fluorescent label; a binding site for a protein or protein complex; and the like). That is, guide RNAs can include one or more modified nucleosides or nucleotides, or one or more non-naturally and/or naturally occurring components or configurations that are used instead of or in addition to the canonical A, G, C, and U residues. Examples of such modifications include, for example, a 5′ cap (e.g., a 7-methylguanylate cap (m7G)); a 3′ polyadenylated tail (i.e., a 3′ poly(A) tail); a riboswitch sequence (e.g., to allow for regulated stability and/or regulated accessibility by proteins and/or protein complexes); a stability control sequence; a sequence that forms a dsRNA duplex (i.e., a hairpin); a modification or sequence that targets the RNA to a subcellular location (e.g., nucleus, mitochondria, chloroplasts, and the like); a modification or sequence that provides for tracking (e.g., direct conjugation to a fluorescent molecule, conjugation to a moiety that facilitates fluorescent detection, a sequence that allows for fluorescent detection, and so forth); a modification or sequence that provides a binding site for proteins (e.g., proteins that act on DNA, including transcriptional activators, transcriptional repressors, DNA methyltransferases, DNA demethylases, histone acetyltransferases, histone deacetylases, and the like); and combinations thereof. Other examples of modifications include engineered stem loop duplex structures, engineered bulge regions, engineered hairpins 3′ of the stem loop duplex structure, or any combination thereof. See, e.g., US 2015/0376586, herein incorporated by reference in its entirety for all purposes. A bulge can be an unpaired region of nucleotides within the duplex made up of the crRNA-like region and the minimum tracrRNA-like region. A bulge can comprise, on one side of the duplex, an unpaired 5′-XXXY-3′ where X is any purine and Y can be a nucleotide that can form a wobble pair with a nucleotide on the opposite strand, and an unpaired nucleotide region on the other side of the duplex.

[0847] Guide RNAs can comprise modified nucleosides and modified nucleotides including, for example, one or more of the following: (1) alteration or replacement of one or both of the non-linking phosphate oxygens and/or of one or more of the linking phosphate oxygens in the phosphodiester backbone linkage (an exemplary backbone modification); (2) alteration or replacement of a constituent of the ribose sugar such as alteration or replacement of the 2′ hydroxyl on the ribose sugar (an exemplary sugar modification); (3) replacement (e.g., wholesale replacement) of the phosphate moiety with dephospho linkers (an exemplary backbone modification); (4) modification or replacement of a naturally occurring nucleobase, including with a non-canonical nucleobase (an exemplary base modification); (5) replacement or modification of the ribose-phosphate backbone (an exemplary backbone modification); (6) modification of the 3′ end or 5′ end of the oligonucleotide (e.g., removal, modification or replacement of a terminal phosphate group or conjugation of a moiety, cap, or linker (such 3′ or 5′ cap modifications may comprise a sugar and/or backbone modification); and (7) modification or replacement of the sugar (an exemplary sugar modification). Other possible guide RNA modifications include modifications of or replacement of uracils or poly-uracil tracts. See, e.g., WO 2015/048577 and US 2016/0237455, each of which is herein incorporated by reference in its entirety for all purposes. Similar modifications can be made to Cas-encoding nucleic acids, such as Cas mRNAs. For example, Cas mRNAs can be modified by depletion of uridine using synonymous codons.

[0848] Chemical modifications such at hose listed above can be combined to provide modified gRNAs and/or mRNAs comprising residues (nucleosides and nucleotides) that can have two, three, four, or more modifications. For example, a modified residue can have a modified sugar and a modified nucleobase. In one example, every base of a gRNA is modified (e.g., all bases have a modified phosphate group, such as a phosphorothioate group). For example, all or substantially all of the phosphate groups of a gRNA can be replaced with phosphorothioate groups. Alternatively, or additionally, a modified gRNA can comprise at least one modified residue at or near the 5′ end. Alternatively, or additionally, a modified gRNA can comprise at least one modified residue at or near the 3′ end.

[0849] Some gRNAs comprise one, two, three or more modified residues. For example, at least 5%, at least 10%, at least 15%, at least 20%, at least 25%, at least 30%, at least 35%, at least 40%, at least 45%, at least 50%, at least 55%, at least 60%, at least 65%, at least 70%, at least 75%, at least 80%, at least 85%, at least 90%, at least 95%, or 100% of the positions in a modified gRNA can be modified nucleosides or nucleotides.

[0850] Unmodified nucleic acids can be prone to degradation. Exogenous nucleic acids can also induce an innate immune response. Modifications can help introduce stability and reduce immunogenicity. Some gRNAs described herein can contain one or more modified nucleosides or nucleotides to introduce stability toward intracellular or serum-based nucleases. Some modified gRNAs described herein can exhibit a reduced innate immune response when introduced into a population of cells.

[0851] The gRNAs disclosed herein can comprise a backbone modification in which the phosphate group of a modified residue can be modified by replacing one or more of the oxygens with a different substituent. The modification can include the wholesale replacement of an unmodified phosphate moiety with a modified phosphate group as described herein. Backbone modifications of the phosphate backbone can also include alterations that result in either an uncharged linker or a charged linker with unsymmetrical charge distribution.

[0852] Examples of modified phosphate groups include, phosphorothioate, phosphoroselenates, borano phosphates, borano phosphate esters, hydrogen phosphonates, phosphoroamidates, alkyl or aryl phosphonates and phosphotriesters. The phosphorous atom in an unmodified phosphate group is achiral. However, replacement of one of the non-bridging oxygens with one of the above atoms or groups of atoms can render the phosphorous atom chiral. The stereogenic phosphorous atom can possess either the “R” configuration (Rp) or the “S” configuration (Sp). The backbone can also be modified by replacement of a bridging oxygen, (i.e., the oxygen that links the phosphate to the nucleoside), with nitrogen (bridged phosphoroamidates), sulfur (bridged phosphorothioates) and carbon (bridged methylenephosphonates). The replacement can occur at either linking oxygen or at both of the linking oxygens.

[0853] The phosphate group can be replaced by non-phosphorus containing connectors in certain backbone modifications. In some embodiments, the charged phosphate group can be replaced by a neutral moiety. Examples of moieties which can replace the phosphate group can include, without limitation, e.g., methyl phosphonate, hydroxylamino, siloxane, carbonate, carboxymethyl, carbamate, amide, thioether, ethylene oxide linker, sulfonate, sulfonamide, thioformacetal, formacetal, oxime, methyleneimino, methylenemethylimino, methylenehydrazo, methylenedimethylhydrazo and methyleneoxymethylimino.

[0854] Scaffolds that can mimic nucleic acids can also be constructed wherein the phosphate linker and ribose sugar are replaced by nuclease resistant nucleoside or nucleotide surrogates. Such modifications may comprise backbone and sugar modifications. In some embodiments, the nucleobases can be tethered by a surrogate backbone. Examples can include, without limitation, the morpholino, cyclobutyl, pyrrolidine and peptide nucleic acid (PNA) nucleoside surrogates.

[0855] The modified nucleosides and modified nucleotides can include one or more modifications to the sugar group (a sugar modification). For example, the 2′ hydroxyl group (OH) can be modified (e.g., replaced with a number of different oxy or deoxy substituents. Modifications to the 2′ hydroxyl group can enhance the stability of the nucleic acid since the hydroxyl can no longer be deprotonated to form a 2′-alkoxide ion.

[0856] Examples of 2′ hydroxyl group modifications can include alkoxy or aryloxy (OR, wherein “R” can be, e.g., alkyl, cycloalkyl, aryl, aralkyl, heteroaryl or a sugar); polyethyleneglycols (PEG), O(CH₂CH₂O)ₙCH₂CH₂OR wherein R can be, e.g., H or optionally substituted alkyl, and n can be an integer from 0 to 20 (e.g., from 0 to 4, from 0 to 8, from 0 to 10, from 0 to 16, from 1 to 4, from 1 to 8, from 1 to 10, from 1 to 16, from 1 to 20, from 2 to 4, from 2 to 8, from 2 to 10, from 2 to 16, from 2 to 20, from 4 to 8, from 4 to 10, from 4 to 16, and from 4 to 20). The 2′ hydroxyl group modification can be 2′-O-Me. Likewise, the 2′ hydroxyl group modification can be a 2′-fluoro modification, which replaces the 2′ hydroxyl group with a fluoride. The 2′ hydroxyl group modification can include locked nucleic acids (LNA) in which the 2′ hydroxyl can be connected, e.g., by a C₁₋₆ alkylene or C₁₋₆ heteroalkylene bridge, to the 4′ carbon of the same ribose sugar, where exemplary bridges can include methylene, propylene, ether, or amino bridges; O-amino (wherein amino can be, e.g., NH₂; alkylamino, dialkylamino, heterocyclyl, arylamino, diarylamino, heteroarylamino, or diheteroarylamino, ethylenediamine, or polyamino) and aminoalkoxy, O(CH₂)ₙ-amino, (wherein amino can be, e.g., NH₂; alkylamino, dialkylamino, heterocyclyl, arylamino, diarylamino, heteroarylamino, or diheteroarylamino, ethylenediamine, or polyamino). The 2′ hydroxyl group modification can include unlocked nucleic acids (UNA) in which the ribose ring lacks the C2′-C3′ bond. The 2′ hydroxyl group modification can include the methoxyethyl group (MOE), (OCH₂CH₂OCH₃, e.g., a PEG derivative).

[0857] Deoxy 2′ modifications can include hydrogen (i.e. deoxyribose sugars, e.g., at the overhang portions of partially dsRNA); halo (e.g., bromo, chloro, fluoro, or iodo); amino (wherein amino can be, e.g., NH2; alkylamino, dialkylamino, heterocyclyl, arylamino, diarylamino, heteroarylamino, diheteroarylamino, or amino acid); NH(CH₂CH₂NH)ₙCH₂CH₂-amino (wherein amino can be, e.g., as described herein), —NHC(O)R (wherein R can be, e.g., alkyl, cycloalkyl, aryl, aralkyl, heteroaryl or sugar), cyano; mercapto; alkyl-thio-alkyl; thioalkoxy; and alkyl, cycloalkyl, aryl, alkenyl and alkynyl, which may be optionally substituted with e.g., an amino as described herein.

[0858] The sugar modification can comprise a sugar group which may also contain one or more carbons that possess the opposite stereochemical configuration than that of the corresponding carbon in ribose. Thus, a modified nucleic acid can include nucleotides containing e.g., arabinose, as the sugar. The modified nucleic acids can also include abasic sugars. These abasic sugars can also be further modified at one or more of the constituent sugar atoms. The modified nucleic acids can also include one or more sugars that are in the L form (e.g., L-nucleosides).

[0859] The modified nucleosides and modified nucleotides described herein, which can be incorporated into a modified nucleic acid, can include a modified base, also called a nucleobase. Examples of nucleobases include, but are not limited to, adenine (A), guanine (G), cytosine (C), and uracil (U). These nucleobases can be modified or wholly replaced to provide modified residues that can be incorporated into modified nucleic acids. The nucleobase of the nucleotide can be independently selected from a purine, a pyrimidine, a purine analog, or pyrimidine analog. In some embodiments, the nucleobase can include, for example, naturally-occurring and synthetic derivatives of a base.

[0860] In a dual guide RNA, each of the crRNA and the tracrRNA can contain modifications. Such modifications may be at one or both ends of the crRNA and/or tracrRNA. In a sgRNA, one or more residues at one or both ends of the sgRNA may be chemically modified, and/or internal nucleosides may be modified, and/or the entire sgRNA may be chemically modified. Some gRNAs comprise a 5′ end modification. Some gRNAs comprise a 3′ end modification.

[0861] The guide RNAs disclosed herein can comprise one of the modification patterns disclosed in WO 2018/107028 A1, herein incorporated by reference in its entirety for all purposes. The guide RNAs disclosed herein can also comprise one of the structures/modification patterns disclosed in US 2017/0114334, herein incorporated by reference in its entirety for all purposes. The guide RNAs disclosed herein can also comprise one of the structures/modification patterns disclosed in WO 2017/136794, WO 2017/004279, US 2018/0187186, or US 2019/0048338, each of which is herein incorporated by reference in its entirety for all purposes.

[0862] As one example, nucleotides at the 5′ or 3′ end of a guide RNA can include phosphorothioate linkages (e.g., the bases can have a modified phosphate group that is a phosphorothioate group). For example, a guide RNA can include phosphorothioate linkages between the 2, 3, or 4 terminal nucleotides at the 5′ or 3′ end of the guide RNA. As another example, nucleotides at the 5′ and/or 3′ end of a guide RNA can have 2′-O-methyl modifications. For example, a guide RNA can include 2′-O-methyl modifications at the 2, 3, or 4 terminal nucleotides at the 5′ and/or 3′ end of the guide RNA (e.g., the 5′ end). See, e.g., WO 2017/173054 A1 and Finn et al. (2018) Cell Rep. 22(9):2227-2235, each of which is herein incorporated by reference in its entirety for all purposes. Other possible modifications are described in more detail elsewhere herein. In a specific example, a guide RNA includes 2′-O-methyl analogs and 3′ phosphorothioate internucleotide linkages at the first three 5′ and 3′ terminal RNA residues. Such chemical modifications can, for example, provide greater stability and protection from exonucleases to guide RNAs, allowing them to persist within cells for longer than unmodified guide RNAs. Such chemical modifications can also, for example, protect against innate intracellular immune responses that can actively degrade RNA or trigger immune cascades that lead to cell death.

[0863] As one example, any of the guide RNAs described herein can comprise at least one modification. In one example, the at least one modification comprises a 2′-O-methyl (2′-O-Me) modified nucleotide, a phosphorothioate (PS) bond between nucleotides, a 2′-fluoro (2′-F) modified nucleotide, or a combination thereof. For example, the at least one modification can comprise a 2′-O-methyl (2′-O-Me) modified nucleotide. Alternatively, or additionally, the at least one modification can comprise a phosphorothioate (PS) bond between nucleotides. Alternatively, or additionally, the at least one modification can comprise a 2′-fluoro (2′-F) modified nucleotide. In one example, a guide RNA described herein comprises one or more 2′-O-methyl (2′-O-Me) modified nucleotides and one or more phosphorothioate (PS) bonds between nucleotides.

[0864] The modifications can occur anywhere in the guide RNA. As one example, the guide RNA comprises a modification at one or more of the first five nucleotides at the 5′ end of the guide RNA, the guide RNA comprises a modification at one or more of the last five nucleotides of the 3′ end of the guide RNA, or a combination thereof. For example, the guide RNA can comprise phosphorothioate bonds between the first four nucleotides of the guide RNA, phosphorothioate bonds between the last four nucleotides of the guide RNA, or a combination thereof. Alternatively, or additionally, the guide RNA can comprise 2′-O-Me modified nucleotides at the first three nucleotides at the 5′ end of the guide RNA, can comprise 2′-O-Me modified nucleotides at the last three nucleotides at the 3′ end of the guide RNA, or a combination thereof.

[0865] In one example, a modified gRNA can comprise the following sequence: mN*mN*mN*NNNNNNNNNNNNNNNNNGUUUUAGAmGmCmUmAmGmAmAmAmUmA mGmCAAGUUAAAAUAAGGCUAGUCCGUUAUCAmAmCmUmUmGmAmAmAmAmAm GmUmGmGmCmAmCmCmGmAmGmUmCmGmGmUmGmCmU*mU*mU*mU (SEQ ID NO: 152), where “N” may be any natural or non-natural nucleotide. For example, the totality of N residues comprise a human ALB intron 1 DNA-targeting segment as described herein (e.g., the sequence set forth in SEQ ID NO: 152, wherein the N residues are replaced with the DNA-targeting segment of any one of SEQ ID NOS: 153-184, the DNA-targeting segment of any one of SEQ ID NOS: 159, 153, 156, and 164, or the DNA-targeting segment of SEQ ID NO: 159. For example, a modified gRNA can comprise the sequence set forth in any one of SEQ ID NOS: 217-248, the sequence set forth in any one of SEQ ID NOS: 223, 217, 220, and 228, or the sequence set forth in SEQ ID NO: 223 in Table 6. The terms “mA,” “mC,” “mU,” and “mG” denote a nucleotide (A, C, U, and G, respectively) that has been modified with 2′-O-Me. The symbol “*” depicts a phosphorothioate modification. In certain embodiments, A, C, G, U, and N independently denote a ribose sugar, i.e., 2′-OH. In certain embodiments in the context of a modified sequence, A, C, G, U, and N denote a ribose sugar, i.e., 2′-OH. A phosphorothioate linkage or bond refers to a bond where a sulfur is substituted for one nonbridging phosphate oxygen in a phosphodiester linkage, for example, in the bonds between nucleotides bases. When phosphorothioates are used to generate oligonucleotides, the modified oligonucleotides may also be referred to as S-oligos. The terms A*, C*, U*, or G* denote a nucleotide that is linked to the next (e.g., 3′) nucleotide with a phosphorothioate bond. The terms “mA*,” “mC*,” “mU*,” and “mG*” denote a nucleotide (A, C, U, and G, respectively) that has been substituted with 2′-O-Me and that is linked to the next (e.g., 3′) nucleotide with a phosphorothioate bond.

[0866] Another chemical modification that has been shown to influence nucleotide sugar rings is halogen substitution. For example, 2′-fluoro (2′-F) substitution on nucleotide sugar rings can increase oligonucleotide binding affinity and nuclease stability. Abasic nucleotides refer to those which lack nitrogenous bases. Inverted bases refer to those with linkages that are inverted from the normal 5′ to 3′ linkage (i.e., either a 5′ to 5′ linkage or a 3′ to 3′ linkage).

[0867] An abasic nucleotide can be attached with an inverted linkage. For example, an abasic nucleotide may be attached to the terminal 5′ nucleotide via a 5′ to 5′ linkage, or an abasic nucleotide may be attached to the terminal 3′ nucleotide via a 3′ to 3′ linkage. An inverted abasic nucleotide at either the terminal 5′ or 3′ nucleotide may also be called an inverted abasic end cap.

[0868] In one example, one or more of the first three, four, or five nucleotides at the 5′ terminus, and one or more of the last three, four, or five nucleotides at the 3′ terminus are modified. The modification can be, for example, a 2′-O-Me, 2′-F, inverted abasic nucleotide, phosphorothioate bond, or other nucleotide modification well known to increase stability and/or performance.

[0869] In another example, the first four nucleotides at the 5′ terminus, and the last four nucleotides at the 3′ terminus can be linked with phosphorothioate bonds.

[0870] In another example, the first three nucleotides at the 5′ terminus, and the last three nucleotides at the 3′ terminus can comprise a 2′-O-methyl (2′-O-Me) modified nucleotide. In another example, the first three nucleotides at the 5′ terminus, and the last three nucleotides at the 3′ terminus comprise a 2′-fluoro (2′-F) modified nucleotide. In another example, the first three nucleotides at the 5′ terminus, and the last three nucleotides at the 3′ terminus comprise an inverted abasic nucleotide.

[0871] Guide RNAs can be provided in any form. For example, the gRNA can be provided in the form of RNA, either as two molecules (separate crRNA and tracrRNA) or as one molecule (sgRNA), and optionally in the form of a complex with a Cas protein. The gRNA can also be provided in the form of DNA encoding the gRNA. The DNA encoding the gRNA can encode a single RNA molecule (sgRNA) or separate RNA molecules (e.g., separate crRNA and tracrRNA). In the latter case, the DNA encoding the gRNA can be provided as one DNA molecule or as separate DNA molecules encoding the crRNA and tracrRNA, respectively.

[0872] When a gRNA is provided in the form of DNA, the gRNA can be transiently, conditionally, or constitutively expressed in the cell. DNAs encoding gRNAs can be stably integrated into the genome of the cell and operably linked to a promoter active in the cell. Alternatively, DNAs encoding gRNAs can be operably linked to a promoter in an expression construct. For example, the DNA encoding the gRNA can be in a vector comprising a heterologous nucleic acid, such as a nucleic acid encoding a Cas protein. Alternatively, it can be in a vector or a plasmid that is separate from the vector comprising the nucleic acid encoding the Cas protein. Promoters that can be used in such expression constructs include promoters active, for example, in one or more of a eukaryotic cell, a human cell, a non-human cell, a mammalian cell, a non-human mammalian cell, a rodent cell, a mouse cell, a rat cell, a pluripotent cell, an embryonic stem (ES) cell, an adult stem cell, a developmentally restricted progenitor cell, an induced pluripotent stem (iPS) cell, or a one-cell stage embryo. Such promoters can be, for example, conditional promoters, inducible promoters, constitutive promoters, or tissue-specific promoters. Such promoters can also be, for example, bidirectional promoters. Specific examples of suitable promoters include an RNA polymerase III promoter, such as a human U6 promoter, a rat U6 polymerase III promoter, or a mouse U6 polymerase III promoter.

[0873] Alternatively, gRNAs can be prepared by various other methods. For example, gRNAs can be prepared by in vitro transcription using, for example, T7 RNA polymerase (see, e.g., WO 2014/089290 and WO 2014/065596, each of which is herein incorporated by reference in its entirety for all purposes). Guide RNAs can also be a synthetically produced molecule prepared by chemical synthesis. For example, a guide RNA can be chemically synthesized to include 2′-O-methyl analogs and 3′ phosphorothioate internucleotide linkages at the first three 5′ and 3′ terminal RNA residues.

[0874] Guide RNAs (or nucleic acids encoding guide RNAs) can be in compositions comprising one or more guide RNAs (e.g., 1, 2, 3, 4, or more guide RNAs) and a carrier increasing the stability of the guide RNA (e.g., prolonging the period under given conditions of storage (e.g., −20° C., 4° C., or ambient temperature) for which degradation products remain below a threshold, such below 0.5% by weight of the starting nucleic acid or protein; or increasing the stability in vivo). Non-limiting examples of such carriers include poly(lactic acid) (PLA) microspheres, poly(D,L-lactic-coglycolic-acid) (PLGA) microspheres, liposomes, micelles, inverse micelles, lipid cochleates, and lipid microtubules. Such compositions can further comprise a Cas protein, such as a Cas9 protein, or a nucleic acid encoding a Cas protein.

[0875] As one example, a guide RNA targeting intron 1 of a human ALB gene can comprise, consist essentially of, or consist of the sequence set forth in any one of SEQ ID NOS: 185-248. Alternatively, a guide RNA targeting intron 1 of a human ALB gene can comprise, consist essentially of, or consist of a sequence that is at least 75%, at least 80%, at least 85%, at least 90%, or at least 95% identical to the DNA-targeting segment set forth in any one of SEQ ID NOS: 185-248. Alternatively, a guide RNA targeting intron 1 of a human ALB gene can comprise, consist essentially of, or consist of a sequence that is at least 90% or at least 95% identical to the DNA-targeting segment set forth in any one of SEQ ID NOS: 185-248. Alternatively, a guide RNA targeting intron 1 of a human ALB gene can comprise, consist essentially of, or consist of a sequence that differs by no more than 3, no more than 2, or no more than 1 nucleotide from the sequence set forth in any one of SEQ ID NOS: 185-248.

[0876] As another example, a guide RNA targeting intron 1 of a human ALB gene can comprise, consist essentially of, or consist of the sequence set forth in any one of SEQ ID NOS: 191, 223, 185, 217, 188, 220, 196, and 228. Alternatively, a guide RNA targeting intron 1 of a human ALB gene can comprise, consist essentially of, or consist of a sequence that is at least 75%, at least 80%, at least 85%, at least 90%, or at least 95% identical to the DNA-targeting segment set forth in any one of SEQ ID NOS: 191, 223, 185, 217, 188, 220, 196, and 228. Alternatively, a guide RNA targeting intron 1 of a human ALB gene can comprise, consist essentially of, or consist of a sequence that is at least 90% or at least 95% identical to the DNA-targeting segment set forth in any one of SEQ ID NOS: 191, 223, 185, 217, 188, 220, 196, and 228. Alternatively, a guide RNA targeting intron 1 of a human ALB gene can comprise, consist essentially of, or consist of a sequence that differs by no more than 3, no more than 2, or no more than 1 nucleotide from the sequence set forth in any one of SEQ ID NOS: 191, 223, 185, 217, 188, 220, 196, and 228.

[0877] As another example, a guide RNA targeting intron 1 of a human ALB gene can comprise, consist essentially of, or consist of the sequence set forth in SEQ ID NO: 191 or 223. Alternatively, a guide RNA targeting intron 1 of a human ALB gene can comprise, consist essentially of, or consist of a sequence that is at least 75%, at least 80%, at least 85%, at least 90%, or at least 95% identical to the DNA-targeting segment set forth in SEQ ID NO: 191 or 223. Alternatively, a guide RNA targeting intron 1 of a human ALB gene can comprise, consist essentially of, or consist of a sequence that is at least 90% or at least 95% identical to the DNA-targeting segment set forth in SEQ ID NO: 191 or 223. Alternatively, a guide RNA targeting intron 1 of a human ALB gene can comprise, consist essentially of, or consist of a sequence that differs by no more than 3, no more than 2, or no more than 1 nucleotide from the sequence set forth in SEQ ID NO: 191 or 223.

[0878] As another example, a guide RNA targeting intron 1 of a human ALB gene can comprise, consist essentially of, or consist of the sequence set forth in SEQ ID NO: 185 or 217. Alternatively, a guide RNA targeting intron 1 of a human ALB gene can comprise, consist essentially of, or consist of a sequence that is at least 75%, at least 80%, at least 85%, at least 90%, or at least 95% identical to the DNA-targeting segment set forth in SEQ ID NO: 185 or 217. Alternatively, a guide RNA targeting intron 1 of a human ALB gene can comprise, consist essentially of, or consist of a sequence that is at least 90% or at least 95% identical to the DNA-targeting segment set forth in SEQ ID NO: 185 or 217. Alternatively, a guide RNA targeting intron 1 of a human ALB gene can comprise, consist essentially of, or consist of a sequence that differs by no more than 3, no more than 2, or no more than 1 nucleotide from the sequence set forth in SEQ ID NO: 185 or 217.

[0879] As another example, a guide RNA targeting intron 1 of a human ALB gene can comprise, consist essentially of, or consist of the sequence set forth in SEQ ID NO: 188 or 220. Alternatively, a guide RNA targeting intron 1 of a human ALB gene can comprise, consist essentially of, or consist of a sequence that is at least 75%, at least 80%, at least 85%, at least 90%, or at least 95% identical to the DNA-targeting segment set forth in SEQ ID NO: 188 or 220. Alternatively, a guide RNA targeting intron 1 of a human ALB gene can comprise, consist essentially of, or consist of a sequence that is at least 90% or at least 95% identical to the DNA-targeting segment set forth in SEQ ID NO: 188 or 220. Alternatively, a guide RNA targeting intron 1 of a human ALB gene can comprise, consist essentially of, or consist of a sequence that differs by no more than 3, no more than 2, or no more than 1 nucleotide from the sequence set forth in SEQ ID NO: 188 or 220.

[0880] As another example, a guide RNA targeting intron 1 of a human ALB gene can comprise, consist essentially of, or consist of the sequence set forth in SEQ ID NO: 196 or 228. Alternatively, a guide RNA targeting intron 1 of a human ALB gene can comprise, consist essentially of, or consist of a sequence that is at least 75%, at least 80%, at least 85%, at least 90%, or at least 95% identical to the DNA-targeting segment set forth in SEQ ID NO: 196 or 228. Alternatively, a guide RNA targeting intron 1 of a human ALB gene can comprise, consist essentially of, or consist of a sequence that is at least 90% or at least 95% identical to the DNA-targeting segment set forth in SEQ ID NO: 196 or 228. Alternatively, a guide RNA targeting intron 1 of a human ALB gene can comprise, consist essentially of, or consist of a sequence that differs by no more than 3, no more than 2, or no more than 1 nucleotide from the sequence set forth in SEQ ID NO: 196 or 228.

### D. Guide RNA Target Sequences

[0881] Target DNAs for guide RNAs include nucleic acid sequences present in a DNA to which a DNA-targeting segment of a gRNA will bind, provided sufficient conditions for binding exist. Suitable DNA/RNA binding conditions include physiological conditions normally present in a cell. Other suitable DNA/RNA binding conditions (e.g., conditions in a cell-free system) are known in the art (see, e.g., Molecular Cloning: A Laboratory Manual, 3rd Ed. (Sambrook et al., Harbor Laboratory Press 2001), herein incorporated by reference in its entirety for all purposes). The strand of the target DNA that is complementary to and hybridizes with the gRNA can be called the “complementary strand,” and the strand of the target DNA that is complementary to the “complementary strand” (and is therefore not complementary to the Cas protein or gRNA) can be called “noncomplementary strand” or “template strand.”

[0882] The target DNA includes both the sequence on the complementary strand to which the guide RNA hybridizes and the corresponding sequence on the non-complementary strand (e.g., adjacent to the protospacer adjacent motif (PAM)). The term “guide RNA target sequence” as used herein refers specifically to the sequence on the non-complementary strand corresponding to (i.e., the reverse complement of) the sequence to which the guide RNA hybridizes on the complementary strand. That is, the guide RNA target sequence refers to the sequence on the non-complementary strand adjacent to the PAM (e.g., upstream or 5′ of the PAM in the case of Cas9). A guide RNA target sequence is equivalent to the DNA-targeting segment of a guide RNA, but with thymines instead of uracils. As one example, a guide RNA target sequence for an SpCas9 enzyme can refer to the sequence upstream of the 5′-NGG-3′ PAM on the non-complementary strand. A guide RNA is designed to have complementarity to the complementary strand of a target DNA, where hybridization between the DNA-targeting segment of the guide RNA and the complementary strand of the target DNA promotes the formation of a CRISPR complex. Full complementarity is not necessarily required, provided that there is sufficient complementarity to cause hybridization and promote formation of a CRISPR complex. If a guide RNA is referred to herein as targeting a guide RNA target sequence, what is meant is that the guide RNA hybridizes to the complementary strand sequence of the target DNA that is the reverse complement of the guide RNA target sequence on the non-complementary strand.

[0883] A target DNA or guide RNA target sequence can comprise any polynucleotide, and can be located, for example, in the nucleus or cytoplasm of a cell or within an organelle of a cell, such as a mitochondrion or chloroplast. A target DNA or guide RNA target sequence can be any nucleic acid sequence endogenous or exogenous to a cell. The guide RNA target sequence can be a sequence coding a gene product (e.g., a protein) or a non-coding sequence (e.g., a regulatory sequence) or can include both.

[0884] Site-specific binding and cleavage of a target DNA by a Cas protein can occur at locations determined by both (i) base-pairing complementarity between the guide RNA and the complementary strand of the target DNA and (ii) a short motif, called the protospacer adjacent motif (PAM), in the non-complementary strand of the target DNA. The PAM can flank the guide RNA target sequence. Optionally, the guide RNA target sequence can be flanked on the 3′ end by the PAM (e.g., for Cas9). Alternatively, the guide RNA target sequence can be flanked on the 5′ end by the PAM (e.g., for Cpf1). For example, the cleavage site of Cas proteins can be about 1 to about 10 or about 2 to about 5 base pairs (e.g., 3 base pairs) upstream or downstream of the PAM sequence (e.g., within the guide RNA target sequence). In the case of SpCas9, the PAM sequence (i.e., on the non-complementary strand) can be 5′-N₁GG-3′, where N₁ is any DNA nucleotide, and where the PAM is immediately 3′ of the guide RNA target sequence on the non-complementary strand of the target DNA. As such, the sequence corresponding to the PAM on the complementary strand (i.e., the reverse complement) would be 5′-CCN₂-3′, where N₂ is any DNA nucleotide and is immediately 5′ of the sequence to which the DNA-targeting segment of the guide RNA hybridizes on the complementary strand of the target DNA. In some such cases, N₁ and N₂ can be complementary and the N₁-N₂ base pair can be any base pair (e.g., N₁=C and N₂=G; N₁=G and N₂=C; N₁=A and N₂=T; or N₁=T, and N₂=A). In the case of Cas9 from S. aureus, the PAM can be NNGRRT or NNGRR, where N can A, G, C, or T, and R can be G or A. In the case of Cas9 from C. jejuni, the PAM can be, for example, NNNNACAC or NNNNRYAC, where N can be A, G, C, or T, and R can be G or A. In some cases (e.g., for FnCpf1), the PAM sequence can be upstream of the 5′ end and have the sequence 5′-TTN-3′. In the case of DpbCasX, the PAM can have the sequence 5′-TTCN-3′. In the case of CasΦ, the PAM can have the sequence 5′-TBN-3′, wherein B is G, T, or C.

[0885] An example of a guide RNA target sequence is a 20-nucleotide DNA sequence immediately preceding an NGG motif recognized by an SpCas9 protein. For example, two examples of guide RNA target sequences plus PAMs are GN₁₉NGG (SEQ ID NO: 128) or N₂₀NGG (SEQ ID NO: 129). See, e.g., WO 2014/165825, herein incorporated by reference in its entirety for all purposes. The guanine at the 5′ end can facilitate transcription by RNA polymerase in cells. Other examples of guide RNA target sequences plus PAMs can include two guanine nucleotides at the 5′ end (e.g., GGN₂₀NGG; SEQ ID NO: 130) to facilitate efficient transcription by T7 polymerase in vitro. See, e.g., WO 2014/065596, herein incorporated by reference in its entirety for all purposes. Other guide RNA target sequences plus PAMs can have between 4-22 nucleotides in length of SEQ ID NOS: 128-130, including the 5′ G or GG and the 3′ GG or NGG. Yet other guide RNA target sequences plus PAMs can have between 14 and 20 nucleotides in length of SEQ ID NOS: 128-130.

[0886] Formation of a CRISPR complex hybridized to a target DNA can result in cleavage of one or both strands of the target DNA within or near the region corresponding to the guide RNA target sequence (i.e., the guide RNA target sequence on the non-complementary strand of the target DNA and the reverse complement on the complementary strand to which the guide RNA hybridizes). For example, the cleavage site can be within the guide RNA target sequence (e.g., at a defined location relative to the PAM sequence). The “cleavage site” includes the position of a target DNA at which a Cas protein produces a single-strand break or a double-strand break. The cleavage site can be on only one strand (e.g., when a nickase is used) or on both strands of a double-stranded DNA. Cleavage sites can be at the same position on both strands (producing blunt ends; e.g., Cas9)) or can be at different sites on each strand (producing staggered ends (i.e., overhangs); e.g., Cpf1). Staggered ends can be produced, for example, by using two Cas proteins, each of which produces a single-strand break at a different cleavage site on a different strand, thereby producing a double-strand break. For example, a first nickase can create a single-strand break on the first strand of double-stranded DNA (dsDNA), and a second nickase can create a single-strand break on the second strand of dsDNA such that overhanging sequences are created. In some cases, the guide RNA target sequence or cleavage site of the nickase on the first strand is separated from the guide RNA target sequence or cleavage site of the nickase on the second strand by at least 2, 3, 4, 5, 6, 7, 8, 9, 10, 15, 20, 25, 30, 40, 50, 75, 100, 250, 500, or 1,000 base pairs.

[0887] The guide RNA target sequence can also be selected to minimize off-target modification or avoid off-target effects (e.g., by avoiding two or fewer mismatches to off-target genomic sequences).

[0888] As one example, a guide RNA targeting intron 1 of a human ALB gene can target the guide RNA target sequence set forth in any one of SEQ ID NOS: 249-280. As another example, a guide RNA targeting intron 1 of a human ALB gene can target at least 17, at least 18, at least 19, or at least 20 contiguous nucleotides of the guide RNA target sequence set forth in any one of SEQ ID NOS: 249-280.

[0889] As another example, a guide RNA targeting intron 1 of a human ALB gene can target the guide RNA target sequence set forth in any one of SEQ ID NOS: 255, 249, 252, and 260. As another example, a guide RNA targeting intron 1 of a human ALB gene can target at least 17, at least 18, at least 19, or at least 20 contiguous nucleotides of the guide RNA target sequence set forth in any one of SEQ ID NOS: 255, 249, 252, and 260.

[0890] As another example, a guide RNA targeting intron 1 of a human ALB gene can target the guide RNA target sequence set forth in SEQ ID NO: 255. As another example, a guide RNA targeting intron 1 of a human ALB gene can target at least 17, at least 18, at least 19, or at least 20 contiguous nucleotides of the guide RNA target sequence set forth in SEQ ID NO: 255.

[0891] As another example, a guide RNA targeting intron 1 of a human ALB gene can target the guide RNA target sequence set forth in SEQ ID NO: 249. As another example, a guide RNA targeting intron 1 of a human ALB gene can target at least 17, at least 18, at least 19, or at least 20 contiguous nucleotides of the guide RNA target sequence set forth in SEQ ID NO: 249.

[0892] As another example, a guide RNA targeting intron 1 of a human ALB gene can target the guide RNA target sequence set forth in SEQ ID NO: 252. As another example, a guide RNA targeting intron 1 of a human ALB gene can target at least 17, at least 18, at least 19, or at least 20 contiguous nucleotides of the guide RNA target sequence set forth in SEQ ID NO: 252.

[0893] As another example, a guide RNA targeting intron 1 of a human ALB gene can target the guide RNA target sequence set forth in SEQ ID NO: 260. As another example, a guide RNA targeting intron 1 of a human ALB gene can target at least 17, at least 18, at least 19, or at least 20 contiguous nucleotides of the guide RNA target sequence set forth in SEQ ID NO: 260.

TABLE 9
Human ALB Intron 1 Guide RNA Target Sequences.

| Guide RNA Target Sequence | SEQ ID NO: |
|---|---|
| GAGCAACCTCACTCTTGTCT | 249 |
| ATGCATTTGTTTCAAAATAT | 250 |
| TGCATTTGTTTCAAAATATT | 251 |
| ATTTATGAGATCAACAGCAC | 252 |
| GATCAACAGCACAGGTTTTG | 253 |
| TTAAATAAAGCATAGTGCAA | 254 |
| TAAAGCATAGTGCAATGGAT | 255 |
| TAGTGCAATGGATAGGTCTT | 256 |
| TACTAAAACTTTATTTTACT | 257 |
| AAAGTTGAACAATAGAAAAA | 258 |
| AATGCATAATCTAAGTCAAA | 259 |
| TAATAAAATTCAAACATCCT | 260 |
| GCATCTTTAAAGAATTATTT | 261 |
| TTTGGCATTTATTTCTAAAA | 262 |
| TGTATTTGTGAAGTCTTACA | 263 |
| TCCTAGGTAAAAAAAAAAAA | 264 |
| TAATTTTCTTTTGCGCACTA | 265 |
| TGACTGAAACTTCACAGAAT | 266 |
| GACTGAAACTTCACAGAATA | 267 |
| TTCATTTTAGTCTGTCTTCT | 268 |
| ATTATCTAAGTTTGAATATA | 269 |
| AATTTTTAAAATAGTATTCT | 270 |
| TGAATTATTCTTCTGTTTAA | 271 |
| ATCATCCTGAGTTTTTCTGT | 272 |
| TTACTAAAACTTTATTTTAC | 273 |
| ACCTTTTTTTTTTTTTACCT | 274 |
| AGTGCAATGGATAGGTCTTT | 275 |
| TGATTCCTACAGAAAAACTC | 276 |
| TGGGCAAGGGAAGAAAAAAA | 277 |
| CCTCACTCTTGTCTGGGCAA | 278 |
| ACCTCACTCTTGTCTGGGCA | 279 |
| TGAGCAACCTCACTCTTGTC | 280 |

TABLE 10
Mouse Alb Intron 1 Guide
RNA Target Sequences.

| Guide RNA Target Sequence | SEQ ID NO: |
|---|---|
| CACTCTTGTCTGTGGAAACA | 288 |

### E. Lipid Nanoparticles Comprising Nuclease Agents

[0894] Lipid nanoparticles comprising the nuclease agents (e.g., CRISPR/Cas systems) are also provided. The lipid nanoparticles can alternatively or additionally comprise a nucleic acid construct encoding a polypeptide of interest as disclosed herein. For example, the lipid nanoparticles can comprise a nuclease agent (e.g., CRISPR/Cas system), can comprise a nucleic acid construct encoding a polypeptide of interest, or can comprise both a nuclease agent (e.g., a CRISPR/Cas system) and a nucleic acid construct encoding a polypeptide of interest. Regarding CRISPR/Cas systems, the lipid nanoparticles can comprise the Cas protein in any form (e.g., protein, DNA, or mRNA) and/or can comprise the guide RNA(s) in any form (e.g., DNA or RNA). In one example, the lipid nanoparticles comprise the Cas protein in the form of mRNA (e.g., a modified RNA as described herein) and the guide RNA(s) in the form of RNA (e.g., a modified guide RNA as disclosed herein). As another example, the lipid nanoparticles can comprise the Cas protein in the form of protein and the guide RNA(s) in the form of RNA). In a specific example, the guide RNA and the Cas protein are each introduced in the form of RNA via LNP-mediated delivery in the same LNP. As discussed in more detail elsewhere herein, one or more of the RNAs can be modified. For example, guide RNAs can be modified to comprise one or more stabilizing end modifications at the 5′ end and/or the 3′ end. Such modifications can include, for example, one or more phosphorothioate linkages at the 5′ end and/or the 3′ end and/or one or more 2′-O-methyl modifications at the 5′ end and/or the 3′ end. As another example, Cas mRNA modifications can include substitution with pseudouridine (e.g., fully substituted with pseudouridine), 5′ caps, and polyadenylation. As another example, Cas mRNA modifications can include substitution with N1-methyl-pseudouridine (e.g., fully substituted with N1-methyl-pseudouridine), 5′ caps, and polyadenylation. Other modifications are also contemplated as disclosed elsewhere herein. Delivery through such methods can result in transient Cas expression and/or transient presence of the guide RNA, and the biodegradable lipids improve clearance, improve tolerability, and decrease immunogenicity. Lipid formulations can protect biological molecules from degradation while improving their cellular uptake. Lipid nanoparticles are particles comprising a plurality of lipid molecules physically associated with each other by intermolecular forces. These include microspheres (including unilamellar and multilamellar vesicles, e.g., liposomes), a dispersed phase in an emulsion, micelles, or an internal phase in a suspension. Such lipid nanoparticles can be used to encapsulate one or more nucleic acids or proteins for delivery. Formulations which contain cationic lipids are useful for delivering polyanions such as nucleic acids. Other lipids that can be included are neutral lipids (i.e., uncharged or zwitterionic lipids), anionic lipids, helper lipids that enhance transfection, and stealth lipids that increase the length of time for which nanoparticles can exist in vivo. Examples of suitable cationic lipids, neutral lipids, anionic lipids, helper lipids, and stealth lipids can be found in WO 2016/010840 A1 and WO 2017/173054 A1, each of which is herein incorporated by reference in its entirety for all purposes. An exemplary lipid nanoparticle can comprise a cationic lipid and one or more other components. In one example, the other component can comprise a helper lipid such as cholesterol. In another example, the other components can comprise a helper lipid such as cholesterol and a neutral lipid such as distearoylphosphatidylcholine or 1,2-distearoyl-sn-glycero-3-phosphocholine (DSPC). In another example, the other components can comprise a helper lipid such as cholesterol, an optional neutral lipid such as DSPC, and a stealth lipid such as S010, S024, S027, S031, or S033.

[0895] The LNP may contain one or more or all of the following: (i) a lipid for encapsulation and for endosomal escape; (ii) a neutral lipid for stabilization; (iii) a helper lipid for stabilization; and (iv) a stealth lipid. See, e.g., Finn et al. (2018) Cell Rep. 22(9):2227-2235 and WO 2017/173054 A1, each of which is herein incorporated by reference in its entirety for all purposes. In certain LNPs, the cargo can include a guide RNA or a nucleic acid encoding a guide RNA. In certain LNPs, the cargo can include an mRNA encoding a Cas nuclease, such as Cas9, and a guide RNA or a nucleic acid encoding a guide RNA. In certain LNPs, the cargo can include a nucleic acid construct encoding a polypeptide of interest as described elsewhere herein. In certain LNPs, the cargo can include an mRNA encoding a Cas nuclease, such as Cas9, a guide RNA or a nucleic acid encoding a guide RNA, and a nucleic acid construct encoding a polypeptide of interest. In some LNPs, the lipid component comprises an amine lipid such as a biodegradable, ionizable lipid. In some instances, the lipid component comprises biodegradable, ionizable lipid, cholesterol, DSPC, and PEG-DMG. For example, Cas9 mRNA and gRNA can be delivered to cells and animals utilizing lipid formulations comprising ionizable lipid ((9Z,12Z)-3-((4,4-bis(octyloxy)butanoyl)oxy)-2-((((3-(diethylamino)propoxy)carbonyl)oxy)methyl)propyl octadeca-9,12-dienoate, also called 3-((4,4-bis(octyloxy)butanoyl)oxy)-2-((((3-(diethylamino)propoxy)carbonyl)oxy)methyl)propyl (9Z, 12Z)-octadeca-9,12-dienoate), cholesterol, DSPC, and PEG2k-DMG.

[0896] In some examples, the LNPs comprise cationic lipids. In some examples, the LNPs comprise (9Z,12Z)-3-((4,4-bis(octyloxy)butanoyl)oxy)-2-((((3-(diethylamino)propoxy)carbonyl)oxy)methyl)propyl octadeca-9,12-dienoate, also called 3-((4,4-bis(octyloxy)butanoyl)oxy)-2-((((3-(diethylamino)propoxy)carbonyl)oxy)methyl)propyl (9Z,12Z)-octadeca-9,12-dienoate) or another ionizable lipid. See, e.g., WO 2019/067992, WO 2017/173054, WO 2015/095340, and WO 2014/136086, each of which is herein incorporated by reference in its entirety for all purposes. In some examples, the LNPs comprise molar ratios of a cationic lipid amine to RNA phosphate (N:P) of about 4.5, about 5.0, about 5.5, about 6.0, or about 6.5. In some examples, the terms cationic and ionizable in the context of LNP lipids are interchangeable (e.g., wherein ionizable lipids are cationic depending on the pH).

[0897] The lipid for encapsulation and endosomal escape can be a cationic lipid. The lipid can also be a biodegradable lipid, such as a biodegradable ionizable lipid. One example of a suitable lipid is Lipid A or LP01, which is (9Z,12Z)-3-((4,4-bis(octyloxy)butanoyl)oxy)-2-((((3-(diethylamino)propoxy)carbonyl)oxy)methyl)propyl octadeca-9,12-dienoate, also called 3-((4,4-bis(octyloxy)butanoyl)oxy)-2-((((3-(diethylamino)propoxy)carbonyl)oxy)methyl)propyl (9Z,12Z)-octadeca-9,12-dienoate. See, e.g., Finn et al. (2018) Cell Rep. 22(9):2227-2235 and WO 2017/173054 A1, each of which is herein incorporated by reference in its entirety for all purposes. Another example of a suitable lipid is Lipid B, which is ((5-((dimethylamino)methyl)-1,3-phenylene)bis(oxy))bis(octane-8,1-diyl)bis(decanoate), also called ((5-((dimethylamino)methyl)-1,3-phenylene)bis(oxy))bis(octane-8,1-diyl)bis(decanoate). Another example of a suitable lipid is Lipid C, which is 2-((4-(((3-(dimethylamino)propoxy)carbonyl)oxy)hexadecanoyl)oxy)propane-1,3-diyl(9Z,9′Z,12Z,12′Z)-bis(octadeca-9,12-dienoate). Another example of a suitable lipid is Lipid D, which is 3-(((3-(dimethylamino)propoxy)carbonyl)oxy)-13-(octanoyloxy)tridecyl 3-octylundecanoate. Other suitable lipids include heptatriaconta-6,9,28,31-tetraen-19-yl 4-(dimethylamino)butanoate (also known as [(6Z,9Z,28Z,31Z)-heptatriaconta-6,9,28,31-tetraen-19-yl]4-(dimethylamino)butanoate or Dlin-MC3-DMA (MC3))).

[0898] Some such lipids suitable for use in the LNPs described herein are biodegradable in vivo.

[0899] Such lipids may be ionizable depending upon the pH of the medium they are in. For example, in a slightly acidic medium, the lipids may be protonated and thus bear a positive charge. Conversely, in a slightly basic medium, such as, for example, blood where pH is approximately 7.35, the lipids may not be protonated and thus bear no charge. In some embodiments, the lipids may be protonated at a pH of at least about 9, 9.5, or 10. The ability of such a lipid to bear a charge is related to its intrinsic pKa. For example, the lipid may, independently, have a pKa in the range of from about 5.8 to about 6.2.

[0900] Neutral lipids function to stabilize and improve processing of the LNPs. Examples of suitable neutral lipids include a variety of neutral, uncharged or zwitterionic lipids. Examples of neutral phospholipids suitable for use in the present disclosure include, but are not limited to, 5-heptadecylbenzene-1,3-diol (resorcinol), dipalmitoylphosphatidylcholine (DPPC), distearoylphosphatidylcholine or 1,2-distearoyl-sn-glycero-3-phosphocholine (DSPC), phosphocholine (DOPC), dimyristoylphosphatidylcholine (DMPC), phosphatidylcholine (PLPC), 1,2-diarachidonoyl-sn-glycero-3-phosphocholine (DAPC), phosphatidylethanolamine (PE), egg phosphatidylcholine (EPC), dilauryloylphosphatidylcholine (DLPC), dimyristoylphosphatidylcholine (DMPC), 1-myristoyl-2-palmitoyl phosphatidylcholine (MPPC), 1-palmitoyl-2-myristoyl phosphatidylcholine (PMPC), 1-palmitoyl-2-stearoyl phosphatidylcholine (PSPC), 1,2-diarachidoyl-sn-glycero-3-phosphocholine (DBPC), 1-stearoyl-2-palmitoyl phosphatidylcholine (SPPC), 1,2-dieicosenoyl-sn-glycero-3-phosphocholine (DEPC), palmitoyloleoyl phosphatidylcholine (POPC), lysophosphatidyl choline, dioleoyl phosphatidylethanolamine (DOPE), dilinoleoylphosphatidylcholine distearoylphosphatidylethanolamine (DSPE), dimyristoyl phosphatidylethanolamine (DMPE), dipalmitoyl phosphatidylethanolamine (DPPE), palmitoyloleoyl phosphatidylethanolamine (POPE), lysophosphatidylethanolamine, 1-stearoyl-2-oleoyl-sn-glycero-3-phosphocholine (SOPC), and combinations thereof. For example, the neutral phospholipid may be selected from the group consisting of distearoylphosphatidylcholine (DSPC) and dimyristoyl phosphatidyl ethanolamine (DMPE).

[0901] Helper lipids include lipids that enhance transfection. The mechanism by which the helper lipid enhances transfection can include enhancing particle stability. In certain cases, the helper lipid can enhance membrane fusogenicity. Helper lipids include steroids, sterols, and alkyl resorcinols. Examples of suitable helper lipids suitable include cholesterol, 5-heptadecylresorcinol, and cholesterol hemisuccinate. In one example, the helper lipid may be cholesterol or cholesterol hemisuccinate.

[0902] Stealth lipids include lipids that alter the length of time the nanoparticles can exist in vivo. Stealth lipids may assist in the formulation process by, for example, reducing particle aggregation and controlling particle size. Stealth lipids may modulate pharmacokinetic properties of the LNP. Suitable stealth lipids include lipids having a hydrophilic head group linked to a lipid moiety.

[0903] The hydrophilic head group of stealth lipids can comprise, for example, a polymer moiety selected from polymers based on PEG (sometimes referred to as poly(ethylene oxide)), poly(oxazoline), poly(vinyl alcohol), poly(glycerol), poly(N-vinylpyrrolidone), polyaminoacids, and poly N-(2-hydroxypropyl)methacrylamide. The term PEG means any polyethylene glycol or other polyalkylene ether polymer. In certain LNP formulations, the PEG, is a PEG-2K, also termed PEG 2000, which has an average molecular weight of about 2,000 daltons. See, e.g., WO 2017/173054 A1, herein incorporated by reference in its entirety for all purposes.

[0904] The lipid moiety of the stealth lipid may be derived, for example, from diacylglycerol or diacylglycamide, including those comprising a dialkylglycerol or dialkylglycamide group having alkyl chain length independently comprising from about C4 to about C40 saturated or unsaturated carbon atoms, wherein the chain may comprise one or more functional groups such as, for example, an amide or ester. The dialkylglycerol or dialkylglycamide group can further comprise one or more substituted alkyl groups.

[0905] As one example, the stealth lipid may be selected from PEG-dilauroylglycerol, PEG-dimyristoylglycerol (PEG-DMG), PEG-dipalmitoylglycerol, PEG-distearoylglycerol (PEG-DSPE), PEG-dilaurylglycamide, PEG-dimyristylglycamide, PEG-dipalmitoylglycamide, and PEG-distearoylglycamide, PEG-cholesterol (1-[8′-(Cholest-5-en-3[beta]-oxy)carboxamido-3′,6′-dioxaoctanyl]carbamoyl-[omega]-methyl-poly(ethylene glycol), PEG-DMB (3,4-ditetradecoxylbenzyl-[omega]-methyl-poly(ethylene glycol)ether), 1,2-dimyristoyl-sn-glycero-3-phosphoethanolamine-N-[methoxy(polyethylene glycol)-2000](PEG2k-DMPE), or 1,2-dimyristoyl-rac-glycero-3-methylpolyoxyethylene glycol-2000 (PEG2k-DMG), 1,2-distearoyl-sn-glycero-3-phosphoethanolamine-N-[methoxy(polyethylene glycol)-2000](PEG2k-DSPE), 1,2-distearoyl-sn-glycerol, methoxypoly ethylene glycol (PEG2k-DSG), poly(ethylene glycol)-2000-dimethacrylate (PEG2k-DMA), and 1,2-distearyloxypropyl-3-amine-N-[methoxy(polyethylene glycol)-2000](PEG2k-DSA). In one particular example, the stealth lipid may be PEG2k-DMG.

[0906] In some embodiments, the PEG lipid includes a glycerol group. In some embodiments, the PEG lipid includes a dimyristoylglycerol (DMG) group. In some embodiments, the PEG lipid comprises PEG2k. In some embodiments, the PEG lipid is a PEG-DMG. In some embodiments, the PEG lipid is a PEG2k-DMG. In some embodiments, the PEG lipid is 1,2-dimyristoyl-rac-glycero-3-methoxypolyethylene glycol-2000. In some embodiments, the PEG2k-DMG is 1,2-dimyristoyl-rac-glycero-3-methoxypolyethylene glycol-2000.

[0907] The LNPs can comprise different respective molar ratios of the component lipids in the formulation. The mol-% of the CCD lipid may be, for example, from about 30 mol-% to about 60 mol-%, from about 35 mol-% to about 55 mol-%, from about 40 mol-% to about 50 mol-%, from about 42 mol-% to about 47 mol-%, or about 45%. The mol-% of the helper lipid may be, for example, from about 30 mol-% to about 60 mol-%, from about 35 mol-% to about 55 mol-%, from about 40 mol-% to about 50 mol-%, from about 41 mol-% to about 46 mol-%, or about 44 mol-%. The mol-% of the neutral lipid may be, for example, from about 1 mol-% to about 20 mol-%, from about 5 mol-% to about 15 mol-%, from about 7 mol-% to about 12 mol-%, or about 9 mol-%. The mol-% of the stealth lipid may be, for example, from about 1 mol-% to about 10 mol-%, from about 1 mol-% to about 5 mol-%, from about 1 mol-% to about 3 mol-%, about 2 mol-%, or about 1 mol-%.

[0908] The LNPs can have different ratios between the positively charged amine groups of the biodegradable lipid (N) and the negatively charged phosphate groups (P) of the nucleic acid to be encapsulated. This may be mathematically represented by the equation N/P. For example, the N/P ratio may be from about 0.5 to about 100, from about 1 to about 50, from about 1 to about 25, from about 1 to about 10, from about 1 to about 7, from about 3 to about 5, from about 4 to about 5, about 4, about 4.5, or about 5. The N/P ratio can also be from about 4 to about 7 or from about 4.5 to about 6. In specific examples, the N/P ratio can be 4.5 or can be 6.

[0909] In some LNPs, the cargo can comprise Cas mRNA (e.g., Cas9 mRNA) and gRNA. The Cas mRNA and gRNAs can be in different ratios. For example, the LNP formulation can include a ratio of Cas mRNA to gRNA nucleic acid ranging from about 25:1 to about 1:25, ranging from about 10:1 to about 1:10, ranging from about 5:1 to about 1:5, or about 1:1. Alternatively, the LNP formulation can include a ratio of Cas mRNA to gRNA nucleic acid from about 1:1 to about 1:5, or about 10:1. Alternatively, the LNP formulation can include a ratio of Cas mRNA to gRNA nucleic acid of about 1:10, 25:1, 10:1, 5:1, 3:1, 1:1, 1:3, 1:5, 1:10, or 1:25. Alternatively, the LNP formulation can include a ratio of Cas mRNA to gRNA nucleic acid of from about 2:1 to about 1:2. Alternatively, the LNP formulation can include a ratio of Cas mRNA to gRNA nucleic acid of from about 1:1 to about 1:2. In specific examples, the ratio of Cas mRNA to gRNA can be about 1:1. In specific examples, the ratio of Cas mRNA to gRNA can be about 1:2. In specific examples, the ratio of Cas mRNA to gRNA can be about 2:1.

[0910] Exemplary dosing of LNPs includes about 0.1, about 0.25, about 0.3, about 0.5, about 1, about 2, about 3, about 4, about 5, about 6, about 8, or about 10 mg/kg body weight (mpk) or about 0.1 to about 10, about 0.25 to about 10, about 0.3 to about 10, about 0.5 to about 10, about 1 to about 10, about 2 to about 10, about 3 to about 10, about 4 to about 10, about 5 to about 10, about 6 to about 10, about 8 to about 10, about 0.1 to about 8, about 0.1 to about 6, about 0.1 to about 5, about 0.1 to about 4, about 0.1 to about 3, about 0.1 to about 2, about 0.1 to about 1, about 0.1 to about 0.5, about 0.1 to about 0.3, about 0.1 to about 0.25, about 0.25 to about 8, about 0.3 to about 6, about 0.5 to about 5, about 1 to about 5, or about 2 to about 3 mg/kg body weight with respect to total RNA (Cas9 mRNA and gRNA) cargo content. Such LNPs can be administered, for example, intravenously. In one example, LNP doses between about 0.01 mg/kg and about 10 mg/kg, between about 0.1 and about 10 mg/kg, or between about 0.01 and about 0.3 mg/kg can be used. For example, LNP doses of about 0.01, about 0.03, about 0.1, about 0.3, about 1, about 3, or about 10 mg/kg can be used. Additional exemplary dosing of LNPs includes about 0.1, about 0.25, about 0.3, about 0.5, about 1, about 2, about 3, about 4, about 5, about 6, about 8, or about 10 mg/kg (mpk) body weight or about 0.1 to about 10, about 0.25 to about 10, about 0.3 to about 10, about 0.5 to about 10, about 1 to about 10, about 2 to about 10, about 3 to about 10, about 4 to about 10, about 5 to about 10, about 6 to about 10, about 8 to about 10, about 0.1 to about 8, about 0.1 to about 6, about 0.1 to about 5, about 0.1 to about 4, about 0.1 to about 3, about 0.1 to about 2, about 0.1 to about 1, about 0.1 to about 0.5, about 0.1 to about 0.3, about 0.1 to about 0.25, about 0.25 to about 8, about 0.3 to about 6, about 0.5 to about 5, about 1 to about 5, or about 2 to about 3 mg/kg body weight with respect to total RNA (Cas9 mRNA and gRNA) cargo content. Such LNPs can be administered, for example, intravenously. In one example, LNP doses between about 0.01 mg/kg and about 10 mg/kg, between about 0.1 and about 10 mg/kg, or between about 0.01 and about 0.3 mg/kg can be used. For example, LNP doses of about 0.01, about 0.03, about 0.1, about 0.3, about 0.5, about 1, about 2, about 3, or about 10 mg/kg can be used. In another example, LNP doses between about 0.5 and about 10, between about 0.5 and about 5, between about 0.5 and about 3, between about 1 and about 10, between about 1 and about 5, between about 1 and about 3, or between about 1 and about 2 mg/kg can be used. In another example, LNP doses between about 0.5 and about 3, between about 0.5 and about 2.5, between about 0.5 and about 2, between about 0.5 and about 1.5, between about 0.5 and about 1, between about 1 and about 3, between about 1 and about 2.5, between about 1 and about 2, or between about 1 and about 1.5 mg/kg can be used. In another example, an LNP dose of about 1 mg/kg can be used.

[0911] In some LNPs, the cargo can comprise a nucleic acid construct encoding a polypeptide of interest and gRNA. The nucleic acid construct and gRNAs can be in different ratios. For example, the LNP formulation can include a ratio of nucleic acid construct to gRNA nucleic acid ranging from about 25:1 to about 1:25, ranging from about 10:1 to about 1:10, ranging from about 5:1 to about 1:5, or about 1:1. Alternatively, the LNP formulation can include a ratio of nucleic acid construct to gRNA nucleic acid from about 1:1 to about 1:5, about 5:1 to about 1:1, about 10:1, or about 1:10. Alternatively, the LNP formulation can include a ratio of nucleic acid construct to gRNA nucleic acid of about 1:10, about 25:1, about 10:1, about 5:1, about 3:1, about 1:1, about 1:3, about 1:5, about 1:10, or about 1:25.

[0912] A specific example of a suitable LNP has a nitrogen-to-phosphate (N/P) ratio of about 4.5 and contains biodegradable cationic lipid, cholesterol, DSPC, and PEG2k-DMG in an about 45:44:9:2 molar ratio (about 45:about 44:about 9:about 2). The biodegradable cationic lipid can be (9Z,12Z)-3-((4,4-bis(octyloxy)butanoyl)oxy)-2-((((3-(diethylamino)propoxy)carbonyl)oxy)methyl)propyl octadeca-9,12-dienoate, also called 3-((4,4-bis(octyloxy)butanoyl)oxy)-2-((((3-(diethylamino)propoxy)carbonyl)oxy)methyl)propyl (9Z,12Z)-octadeca-9,12-dienoate. See, e.g., Finn et al. (2018) Cell Rep. 22(9):2227-2235, herein incorporated by reference in its entirety for all purposes. The Cas9 mRNA can be in an about 1:1 (about 1:about 1) ratio by weight to the guide RNA. Another specific example of a suitable LNP contains Dlin-MC3-DMA (MC3), cholesterol, DSPC, and PEG-DMG in an about 50:38.5:10:1.5 molar ratio (about 50:about 38.5:about 10:about 1.5). The Cas9 mRNA can be in an about 1:2 ratio (about 1:about 2) by weight to the guide RNA. The Cas9 mRNA can be in an about 1:1 ratio (about 1:about 1) by weight to the guide RNA. The Cas9 mRNA can be in an about 2:1 ratio (about 2:about 1) by weight to the guide RNA.

[0913] Another specific example of a suitable LNP has a nitrogen-to-phosphate (N/P) ratio of about 6 and contains biodegradable cationic lipid, cholesterol, DSPC, and PEG2k-DMG in an about 50:38:9:3 molar ratio (about 50:about 38:about 9:about 3). The biodegradable cationic lipid can be Lipid A ((9Z,12Z)-3-((4,4-bis(octyloxy)butanoyl)oxy)-2-((((3-(diethylamino)propoxy)carbonyl)oxy)methyl)propyl octadeca-9,12-dienoate, also called 3-((4,4-bis(octyloxy)butanoyl)oxy)-2-((((3-(diethylamino)propoxy)carbonyl)oxy)methyl)propyl (9Z,12Z)-octadeca-9,12-dienoate). The Cas9 mRNA can be in an about 1:2 ratio (about 1:about 2) by weight to the guide RNA. The Cas9 mRNA can be in an about 1:1 ratio (about 1:about 1) by weight to the guide RNA. The Cas9 mRNA can be in an about 2:1 (about 2:about 1) ratio by weight to the guide RNA.

[0914] Another specific example of a suitable LNP has a nitrogen-to-phosphate (N/P) ratio of about 3 and contains a cationic lipid, a structural lipid, cholesterol (e.g., cholesterol (ovine) (Avanti 700000)), and PEG2k-DMG (e.g., PEG-DMG 2000 (NOF America-SUNBRIGHT® GM-020(DMG-PEG)) in an about 50:10:38.5:1.5 ratio (about 50:about 10:about 38.5:about 1.5) or an about 47:10:42:1 ratio (about 47:about 10:about 42:about 1). The structural lipid can be, for example, DSPC (e.g., DSPC (Avanti 850365)), SOPC, DOPC, or DOPE. The cationic/ionizable lipid can be, for example, Dlin-MC3-DMA (e.g., Dlin-MC3-DMA (Biofine International)). The Cas9 mRNA can be in an about 1:2 ratio (about 1:about 2) by weight to the guide RNA. The Cas9 mRNA can be in an about 1:1 ratio (about 1:about 1) by weight to the guide RNA. The Cas9 mRNA can be in an about 2:1 ratio (about 2:about 1) by weight to the guide RNA.

[0915] Another specific example of a suitable LNP contains Dlin-MC3-DMA, DSPC, cholesterol, and a PEG lipid in an about 45:9:44:2 ratio (about 45:about 9:about 44:about 2). Another specific example of a suitable LNP contains Dlin-MC3-DMA, DOPE, cholesterol, and PEG lipid or PEG DMG in an about 50:10:39:1 ratio (about 50:about 10:about 39:about 1). Another specific example of a suitable LNP has Dlin-MC3-DMA, DSPC, cholesterol, and PEG2k-DMG at an about 55:10:32.5:2.5 ratio (about 55:about 10:about 32.5:about 2.5). Another specific example of a suitable LNP has Dlin-MC3-DMA, DSPC, cholesterol, and PEG-DMG in an about 50:10:38.5:1.5 ratio (about 50:about 10:about 38.5:about 1.5). Another specific example of a suitable LNP has Dlin-MC3-DMA, DSPC, cholesterol, and PEG-DMG in an about 50:10:38.5:1.5 ratio (about 50:about 10:about 38.5:about 1.5). The Cas9 mRNA can be in an about 1:2 ratio (about 1:about 2) by weight to the guide RNA. The Cas9 mRNA can be in an about 1:1 ratio (about 1:about 1) by weight to the guide RNA. The Cas9 mRNA can be in an about 2:1 ratio (about 2:about 1) by weight to the guide RNA.

[0916] Other examples of suitable LNPs can be found, e.g., in WO 2019/067992, WO 2020/082042, US 2020/0270617, WO 2020/082041, US 2020/0268906, WO 2020/082046 (see, e.g., pp. 85-86), and US 2020/0289628, each of which is herein incorporated by reference in its entirety for all purposes.

### F. Vectors Comprising Nuclease Agents

[0917] The nuclease agents disclosed herein (e.g., ZFN, TALEN, or CRISPR/Cas) can be provided in a vector for expression. A vector can comprise additional sequences such as, for example, replication origins, promoters, and genes encoding antibiotic resistance.

[0918] Some vectors may be circular. Alternatively, the vector may be linear. The vector can be in the packaged for delivered via a lipid nanoparticle, liposome, non-lipid nanoparticle, or viral capsid. Non-limiting exemplary vectors include plasmids, phagemids, cosmids, artificial chromosomes, minichromosomes, transposons, viral vectors, and expression vectors.

[0919] Introduction of nucleic acids can also be accomplished by virus-mediated delivery, such as AAV-mediated delivery or lentivirus-mediated delivery. The vectors can be, for example, viral vectors such as adeno-associated virus (AAV) vectors. The AAV may be any suitable serotype and may be a single-stranded AAV (ssAAV) or a self-complementary AAV (scAAV). Other exemplary viruses/viral vectors include retroviruses, lentiviruses, adenoviruses, vaccinia viruses, poxviruses, and herpes simplex viruses. The viruses can infect dividing cells, non-dividing cells, or both dividing and non-dividing cells. The viruses can integrate into the host genome or alternatively do not integrate into the host genome. Such viruses can also be engineered to have reduced immunity. The viruses can be replication-competent or can be replication-defective (e.g., defective in one or more genes necessary for additional rounds of virion replication and/or packaging). Viral vector may be genetically modified from their wild type counterparts. For example, the viral vector may comprise an insertion, deletion, or substitution of one or more nucleotides to facilitate cloning or such that one or more properties of the vector is changed. Such properties may include packaging capacity, transduction efficiency, immunogenicity, genome integration, replication, transcription, and translation. In some examples, a portion of the viral genome may be deleted such that the virus is capable of packaging exogenous sequences having a larger size. In some examples, the viral vector may have an enhanced transduction efficiency. In some examples, the immune response induced by the virus in a host may be reduced. In some examples, viral genes (such as integrase) that promote integration of the viral sequence into a host genome may be mutated such that the virus becomes non-integrating. In some examples, the viral vector may be replication defective. In some examples, the viral vector may comprise exogenous transcriptional or translational control sequences to drive expression of coding sequences on the vector. In some examples, the virus may be helper-dependent. For example, the virus may need one or more helper virus to supply viral components (such as viral proteins) required to amplify and package the vectors into viral particles. In such a case, one or more helper components, including one or more vectors encoding the viral components, may be introduced into a host cell or population of host cells along with the vector system described herein. In other examples, the virus may be helper-free. For example, the virus may be capable of amplifying and packaging the vectors without a helper virus. In some examples, the vector system described herein may also encode the viral components required for virus amplification and packaging.

[0920] Exemplary viral titers (e.g., AAV titers) include about 10¹², about 10¹³, about 10¹⁴, about 10¹⁵, and about 10¹⁶ vector genomes (vg)/mL, or between about 10¹² to about 10¹⁶, between about 10¹² to about 10¹⁵, between about 10¹² to about 10¹⁴, between about 10¹² to about 10¹³, between about 10¹³ to about 10¹⁶, between about 10¹⁴ to about 10¹⁶, between about 10¹⁵ to about 10¹⁶, or between about 10¹³ to about 10¹⁵ vg/mL. Other exemplary viral titers (e.g., AAV titers) include about 10¹², about 10¹³, about 10¹⁴, about 10¹⁵, and about 10¹⁶ vector genomes (vg)/kg of body weight, or between about 10¹² to about 10¹⁶, between about 10¹² to about 10¹³, between about 10¹² to about 10¹⁴, between about 10¹² to about 10¹³, between about 10¹³ to about 10¹⁶, between about 10¹⁴ to about 10¹⁶, between about 10¹⁵ to about 10¹⁶, or between about 10¹³ to about 10¹⁵ vg/kg of body weight. In one example, the viral titer is between about 10¹³ to about 10¹⁴ vg/mL or vg/kg. In another example, the viral titer is between about 10¹² to about 10¹³ vg/mL or vg/kg (e.g., between about 10¹² to about 10¹³ vg/kg). In another example, the viral titer is between about 10¹² to about 10¹⁴ vg/mL or vg/kg (e.g., between about 10¹² to about 10¹⁴ vg/kg). For example, the viral titer can be between about 1.5E12 to about 1.5E13 vg/kg, can be about 1.5E12 vg/kg, or can be about 1.5E13 vg/kg. In another example, the viral titer is about 2E13 vg/mL or vg/kg. In another example, the viral titer is about 1E12 to about 2E14 vg/kg (e.g., without plasma cell depletion and redosing). In another example, the viral titer is about 3E11 vg/kg to about 5E13 vg/kg (e.g., 2-3× lower with plasma cell depletion, due to 2-3 separate administrations with redosing).

[0921] Adeno-associated viruses (AAVs) are endemic in multiple species including human and non-human primates (NHPs). At least 12 natural serotypes and hundreds of natural variants have been isolated and characterized to date. See, e.g., Li et al. (2020) Nat. Rev. Genet. 21:255-272, herein incorporated by reference in its entirety for all purposes. AAV particles are naturally composed of a non-enveloped icosahedral protein capsid containing a single-stranded DNA (ssDNA) genome. The DNA genome is flanked by two inverted terminal repeats (ITRs) which serve as the viral origins of replication and packaging signals. The rep gene encodes four proteins required for viral replication and packaging whilst the cap gene encodes the three structural capsid subunits which dictate the AAV serotype, and the Assembly Activating Protein (AAP) which promotes virion assembly in some serotypes.

[0922] Recombinant AAV (rAAV) is currently one of the most commonly used viral vectors used in gene therapy to treat human diseases by delivering therapeutic transgenes to target cells in vivo. Indeed, rAAV vectors are composed of icosahedral capsids similar to natural AAVs, but rAAV virions do not encapsidate AAV protein-coding or AAV replicating sequences. These viral vectors are non-replicating. The only viral sequences required in rAAV vectors are the two ITRs, which are needed to guide genome replication and packaging during manufacturing of the rAAV vector. rAAV genomes are devoid of AAV rep and cap genes, rendering them non-replicating in vivo. rAAV vectors are produced by expressing rep and cap genes along with additional viral helper proteins in trans, in combination with the intended transgene cassette flanked by AAV ITRs.

[0923] In therapeutic rAAV genomes, a gene expression cassette is placed between ITR sequences. Typically, rAAV genome cassettes comprise of a promoter to drive expression of a therapeutic transgene, followed by polyadenylation sequence. The ITRs flanking a rAAV expression cassette can be derived from AAV2, the first serotype to be isolated and converted into a recombinant viral vector. Since then, most rAAV production methods rely on AAV2 Rep-based packaging systems. See, e.g., Colella et al. (2017) Mol. Ther. Methods Clin. Dev. 8:87-104, herein incorporated by reference in its entirety for all purposes.

[0924] Some non-limiting examples of ITRs that can be used include ITRs comprising, consisting essentially of, or consisting of SEQ ID NO: 281, SEQ ID NO: 282, or SEQ ID NO: 283. Other examples of ITRs comprise one or more mutations compared to SEQ ID NO: 281, SEQ ID NO: 282, or SEQ ID NO: 283 and can be at least 90%, at least 91%, at least 92%, at least 93%, at least 94%, at least 95%, at least 96%, at least 97%, at least 98%, or at least 99% identical to SEQ ID NO: 281, SEQ ID NO: 282, or SEQ ID NO: 283. In some rAAV genomes disclosed herein, the nucleic acid encoding the nuclease agent (or component thereof) is flanked on both sides by the same ITR (i.e., the ITR on the 5′ end, and the reverse complement of the ITR on the 3′ end, such as SEQ ID NO: 281 on the 5′ end and SEQ ID NO: 291 on the 3′ end, or SEQ ID NO: 282 on the 5′ end and SEQ ID NO: 825 on the 3′ end, or SEQ ID NO: 283 on the 5′ end and SEQ ID NO: 826 on the 3′ end). In one example, the ITR on each end can comprise, consist essentially of, or consist of SEQ ID NO: 281 (i.e., SEQ ID NO: 281 on the 5′ end, and the reverse complement on the 3′ end). In another example, the ITR on each end can comprise, consist essentially of, or consist of SEQ ID NO: 282 (i.e., SEQ ID NO: 282 on the 5′ end, and the reverse complement on the 3′ end). In one example, the ITR on at least one end comprises, consists essentially of, or consists of SEQ ID NO: 283. In one example, the ITR on the 5′ end comprises, consists essentially of, or consists of SEQ ID NO: 283. In one example, the ITR on the 3′ end comprises, consists essentially of, or consists of SEQ ID NO: 283. In one example, the ITR on each end can comprise, consist essentially of, or consist of SEQ ID NO: 283 (i.e., SEQ ID NO: 283 on the 5′ end, and the reverse complement on the 3′ end). In one example, the ITR on each end can comprise, consist essentially of, or consist of SEQ ID NO: 283. In other rAAV genomes disclosed herein, the nucleic acid encoding the nuclease agent (or component thereof) is flanked by different ITRs on each end. In one example, the ITR on one end comprises, consists essentially of, or consists of SEQ ID NO: 281, and the ITR on the other end comprises, consists essentially of, or consists of SEQ ID NO: 282. In another example, the ITR on one end comprises, consists essentially of, or consists of SEQ ID NO: 281, and the ITR on the other end comprises, consists essentially of, or consists of SEQ ID NO: 283. In one example, the ITR on one end comprises, consists essentially of, or consists of SEQ ID NO: 282, and the ITR on the other end comprises, consists essentially of, or consists of SEQ ID NO: 283.

[0925] The specific serotype of a recombinant AAV vector influences its in vivo tropism to specific tissues. AAV capsid proteins are responsible for mediating attachment and entry into target cells, followed by endosomal escape and trafficking to the nucleus. Thus, the choice of serotype when developing a rAAV vector will influence what cell types and tissues the vector is most likely to bind to and transduce when injected in vivo. Several serotypes of rAAVs, including rAAV8, are capable of transducing the liver when delivered systemically in mice, NHPs and humans. See, e.g., Li et al. (2020) Nat. Rev. Genet. 21:255-272, herein incorporated by reference in its entirety for all purposes.

[0926] Once in the nucleus, the ssDNA genome is released from the virion and a complementary DNA strand is synthesized to generate a double-stranded DNA (dsDNA) molecule. Double-stranded AAV genomes naturally circularize via their ITRs and become episomes which will persist extrachromosomally in the nucleus. Therefore, for episomal gene therapy programs, rAAV-delivered rAAV episomes provide long-term, promoter-driven gene expression in non-dividing cells. However, this rAAV-delivered episomal DNA is diluted out as cells divide. In contrast, the gene therapy described herein is based on gene insertion to allow long-term gene expression.

[0927] When specific rAAVs comprising specific sequences (e.g., specific bidirectional construct sequences or specific unidirectional construct sequences) are disclosed herein, they are meant to encompass the sequence disclosed or the reverse complement of the sequence. For example, if a bidirectional or unidirectional construct disclosed herein consists of the hypothetical sequence 5′-CTGGACCGA-3′, it is also meant to encompass the reverse complement of that sequence (5′-TCGGTCCAG-3′). Likewise, when rAAVs comprising bidirectional or unidirectional construct elements in a specific 5′ to 3′ order are disclosed herein, they are also meant to encompass the reverse complement of the order of those elements. For example, if an rAAV is disclosed herein that comprises a bidirectional construct that comprises from 5′ to 3′ a first splice acceptor, a first coding sequence, a first terminator, a reverse complement of a second terminator, a reverse complement of a second coding sequence, and a reverse complement of a second splice acceptor, it is also meant to encompass a construct comprising from 5′ to 3′ the second splice acceptor, the second coding sequence, the second terminator, a reverse complement of the first terminator, a reverse complement of the first coding sequence, and a reverse complement of the first splice acceptor. Single-stranded AAV genomes are packaged as either sense (plus-stranded) or anti-sense (minus-stranded genomes), and single-stranded AAV genomes of + and − polarity are packaged with equal frequency into mature rAAV virions. See, e.g., LING et al. (2015) J. Mol. Genet. Med. 9(3):175, Zhou et al. (2008) Mol. Ther. 16(3):494-499, and Samulski et al. (1987) J. Virol. 61:3096-3101, each of which is herein incorporated by reference in its entirety for all purposes.

[0928] The ssDNA AAV genome consists of two open reading frames, Rep and Cap, flanked by two inverted terminal repeats that allow for synthesis of the complementary DNA strand. When constructing an AAV transfer plasmid, the transgene is placed between the two ITRs, and Rep and Cap can be supplied in trans. In addition to Rep and Cap, AAV can require a helper plasmid containing genes from adenovirus. These genes (E4, E2a, and VA) mediate AAV replication. For example, the transfer plasmid, Rep/Cap, and the helper plasmid can be transfected into HEK293 cells containing the adenovirus gene E1+ to produce infectious AAV particles. Alternatively, the Rep, Cap, and adenovirus helper genes may be combined into a single plasmid. Similar packaging cells and methods can be used for other viruses, such as retroviruses.

[0929] Multiple serotypes of AAV have been identified. These serotypes differ in the types of cells they infect (i.e., their tropism), allowing preferential transduction of specific cell types. The term AAV includes, for example, AAV1, AAV2, AAV3, AAV3B, AAV4, AAV5, AAV6, AAV6.2, AAV7, AAVrh.64R1, AAVhu.37, AAVrh.8, AAVrh.32.33, AAV8, AAV9, AAV-DJ, AAV2/8, AAVrh10, AAVLK03, AV10, AAV11, AAV12, rh10, and hybrids thereof, avian AAV, bovine AAV, canine AAV, equine AAV, primate AAV, non-primate AAV, and ovine AAV. The genomic sequences of various serotypes of AAV, as well as the sequences of the native terminal repeats (TRs), Rep proteins, and capsid subunits are known in the art. Such sequences may be found in the literature or in public databases such as GenBank. A “AAV vector” as used herein refers to an AAV vector comprising a heterologous sequence not of AAV origin (i.e., a nucleic acid sequence heterologous to AAV), typically comprising a sequence encoding an exogenous polypeptide of interest. The construct may comprise an AAV1, AAV2, AAV3, AAV3B, AAV4, AAV5, AAV6, AAV6.2, AAV7, AAVrh.64R1, AAVhu.37, AAVrh.8, AAVrh.32.33, AAV8, AAV9, AAV-DJ, AAV2/8, AAVrh10, AAVLK03, AV10, AAV11, AAV12, rh10, and hybrids thereof, avian AAV, bovine AAV, canine AAV, equine AAV, primate AAV, non-primate AAV, and ovine AAV capsid sequence. In general, the heterologous nucleic acid sequence (the transgene) is flanked by at least one, and generally by two, AAV inverted terminal repeat sequences (ITRs). An AAV vector may either be single-stranded (ssAAV) or self-complementary (scAAV). Examples of serotypes for liver tissue include AAV3B, AAV5, AAV6, AAV7, AAV8, AAV9, AAVrh.74, and AAVhu.37, and particularly AAV8. In a specific example, the AAV vector comprising the nucleic acid construct can be recombinant AAV8 (rAAV8). A rAAV8 vector as described herein is one in which the capsid is from AAV8. For example, an AAV vector using ITRs from AAV2 and a capsid of AAV8 is considered herein to be a rAAV8 vector.

[0930] Tropism can be further refined through pseudotyping, which is the mixing of a capsid and a genome from different viral serotypes. For example, AAV2/5 indicates a virus containing the genome of serotype 2 packaged in the capsid from serotype 5. Use of pseudotyped viruses can improve transduction efficiency, as well as alter tropism. Hybrid capsids derived from different serotypes can also be used to alter viral tropism. For example, AAV-DJ contains a hybrid capsid from eight serotypes and displays high infectivity across a broad range of cell types in vivo. AAV-DJ8 is another example that displays the properties of AAV-DJ but with enhanced brain uptake. AAV serotypes can also be modified through mutations. Examples of mutational modifications of AAV2 include Y444F, Y500F, Y730F, and S662V. Examples of mutational modifications of AAV3 include Y705F, Y731F, and T492V. Examples of mutational modifications of AAV6 include S663V and T492V. Other pseudotyped/modified AAV variants include AAV2/1, AAV2/6, AAV2/7, AAV2/8, AAV2/9, AAV2.5, AAV8.2, and AAV/SASTG.

[0931] To accelerate transgene expression, self-complementary AAV (scAAV) variants can be used. Because AAV depends on the cell's DNA replication machinery to synthesize the complementary strand of the AAV's single-stranded DNA genome, transgene expression may be delayed. To address this delay, scAAV containing complementary sequences that are capable of spontaneously annealing upon infection can be used, eliminating the requirement for host cell DNA synthesis. However, single-stranded AAV (ssAAV) vectors can also be used.

[0932] To increase packaging capacity, longer transgenes may be split between two AAV transfer plasmids, the first with a 3′ splice donor and the second with a 5′ splice acceptor. Upon co-infection of a cell, these viruses form concatemers, are spliced together, and the full-length transgene can be expressed. Although this allows for longer transgene expression, expression is less efficient. Similar methods for increasing capacity utilize homologous recombination. For example, a transgene can be divided between two transfer plasmids but with substantial sequence overlap such that co-expression induces homologous recombination and expression of the full-length transgene.

[0933] The vector (e.g., AAV such as recombinant AAV8) can be formulated, for example, in 10 mM sodium phosphate, 180 mM sodium chloride, and 0.005% poloxamer 188, at pH 7.3.

[0934] In certain AAVs, the cargo can include nucleic acids encoding one or more guide RNAs (e.g., DNA encoding a guide RNA, or DNA encoding two or more guide RNAs). In certain AAVs, the cargo can include a nucleic acid (e.g., DNA) encoding a Cas nuclease, such as Cas9, and DNA encoding one or more guide RNAs (e.g., DNA encoding a guide RNA, or DNA encoding two or more guide RNAs). In certain AAVs, the cargo can include a nucleic acid construct encoding a polypeptide of interest. In certain AAVs, the cargo can include a nucleic acid (e.g., DNA) encoding a Cas nuclease, such as Cas9, a DNA encoding a guide RNA (or multiple guide RNAs), and a nucleic acid construct encoding a polypeptide of interest.

[0935] For example, Cas or Cas9 and one or more gRNAs (e.g., 1 gRNA or 2 gRNAs or 3 gRNAs or 4 gRNAs) can be delivered via LNP-mediated delivery (e.g., in the form of RNA) or adeno-associated virus (AAV)-mediated delivery (e.g., rAAV8-mediated delivery). For example, a Cas9 mRNA and a gRNA can be delivered via LNP-mediated delivery, or DNA encoding Cas9 and DNA encoding a gRNA can be delivered via AAV-mediated delivery. The Cas or Cas9 and the gRNA(s) can be delivered in a single AAV or via two separate AAVs. For example, a first AAV can carry a Cas or Cas9 expression cassette, and a second AAV can carry a gRNA expression cassette. Similarly, a first AAV can carry a Cas or Cas9 expression cassette, and a second AAV can carry two or more gRNA expression cassettes. Alternatively, a single AAV can carry a Cas or Cas9 expression cassette (e.g., Cas or Cas9 coding sequence operably linked to a promoter) and a gRNA expression cassette (e.g., gRNA coding sequence operably linked to a promoter). Similarly, a single AAV can carry a Cas or Cas9 expression cassette (e.g., Cas or Cas9 coding sequence operably linked to a promoter) and two or more gRNA expression cassettes (e.g., gRNA coding sequences operably linked to promoters). Different promoters can be used to drive expression of the gRNA, such as a U6 promoter or the small tRNA Gln. Likewise, different promoters can be used to drive Cas9 expression. For example, small promoters are used so that the Cas9 coding sequence can fit into an AAV construct. Similarly, small Cas9 proteins (e.g., SaCas9 or CjCas9 are used to maximize the AAV packaging capacity).

### XVII. Methods of Introducing, Integrating, or Expressing a Nucleic Acid Encoding a Polypeptide of Interest in Cells or Subjects and Therapeutic Methods

[0936] The plasma cell depleting agents or combinations comprising plasma cell depleting agents, nucleic acid constructs, nuclease agents and CRISPR/Cas systems, and compositions disclosed herein can be used in methods of introducing a nucleic acid construct encoding a polypeptide of interest in a cell or population of cells in a subject, methods of inserting or integrating a nucleic acid construct encoding a polypeptide of interest into a target genomic locus in a cell or population of cells in a subject, methods of expressing a polypeptide of interest (e.g., from a target genomic locus) in a cell or population of cells in a subject, methods of treating an enzyme deficiency in a subject, and methods or preventing or reducing the onset of a sign or symptom an enzyme deficiency in a subject. In some embodiments, the subject has preexisting immunity against the nucleic acid construct, the polypeptide of interest encoded by the nucleic acid construct, the nuclease agent or one or more nucleic acids encoding the nuclease agent, or a delivery vehicle for the nucleic acid construct, the nuclease agent, or the one or more nucleic acids encoding the nuclease agent. For example, the delivery vehicle can be a recombinant AAV (e.g., AAV comprising a nucleic acid construct described herein). Suitable combinations comprising a plasma cell depleting agent are described in more detail elsewhere herein. In one example, the enzyme deficiency is FIX deficiency or the disease is hemophilia B. In another example, the enzyme deficiency is GAA deficiency or the disease is Pompe disease. In another example, the enzyme deficiency is FVIII deficiency or the disease is hemophilia A. In other methods (e.g., where a nucleic acid construct encodes a neutralizing antigen-binding protein as disclosed herein), the methods can be for treating an infectious disease (e.g., bacterial or viral) or treating a cancer. The plasma cell depleting agents or combinations comprising plasma cell depleting agents can inhibit or prevent an immune response to an immunogen (e.g., nucleic acid construct, nuclease agent or CRISPR/Cas system, e.g., in an immunogenic delivery vehicle) (e.g., an immunogenic delivery vehicle) in a subject in need thereof or can inhibit or prevent generation of antibodies (e.g., neutralizing antibodies) to an immunogen (e.g., nucleic acid construct, nuclease agent or CRISPR/Cas system, e.g., in an immunogenic delivery vehicle) (e.g., an immunogenic delivery vehicle) in a subject in need thereof. The term “immune response” refers to a response of a cell of the immune system (e.g., a B-cell, T-cell, macrophage or polymorphonucleocyte) to a stimulus such as an immunogen, e.g., an antigen (e.g., a viral antigen). Active immune responses can involve differentiation and proliferation of immunocompetent cells, which leads to synthesis of antibodies or the development of cell-mediated reactivity, or both. An active immune response can be mounted by the host after exposure to an antigen (e.g., by infection or by vaccination). Active immune response can be contrasted with passive immunity, which can be acquired through the transfer of substances such as, e.g., an antibody, transfer factor, thymic graft, and/or cytokines from an actively immunized host to a non-immune host. In some embodiments, the immune response is a humoral (antibody producing) immune response and/or a cell-mediated immune response in a subject (e.g., a human).

[0937] An antibody may be capable of both binding and neutralizing a viral particle or a portion thereof (e.g., neutralizing antibody (nAb)). In some embodiments, the antibody may affect pharmacokinetic properties or alter uptake of AAV into different cell types. In some embodiments, neutralizing (or neutralize or neutralization and the like) in the context of the present disclosure may comprise an effect of immunoglobulins, such as antibodies generated in a host immune response, in reducing the efficacy and/or delivery of a viral particle. As an example, neutralization by an at least one nAb described herein may be realized such that the nAb is directed to the viral particle surface (e.g., capsid protein) which may result in aggregation of viral particles and/or may be realized by inhibition of the fusion of viral and a cellular membrane(s) after attachment of the viral particle to a target cell, by inhibition of endocytosis, and/or by inhibition of production of viral progeny. In various embodiments, an antibody generated in a subject's host immune response can play a neutralizing role thereby causing the delivery effectiveness of the viral particle to be reduced or eliminated. In some embodiments, the induced and/or preexisting host immunity may comprise B and/or T cell immune responses described herein. The blockade and/or suppression of induced and/or preexisting host immunity against viral particles or portions thereof, can improve viral transduction and allow for effective re-administration (i.e., re-dosing) of the viral particles during gene therapy.

[0938] In any of the methods, the subject can be from any suitable species, such as eukaryotic or mammalian subjects (e.g., non-human mammalian subject or human subject). A mammal can be, for example, a non-human mammal, a human, a rodent, a rat, a mouse, or a hamster. Other non-human mammals include, for example, non-human primates, e.g., monkeys and apes. The term “non-human” excludes humans. Specific examples include, but are not limited to, humans, rodents, mice, rats, and non-human primates. In a specific example, the subject is a human. Likewise, cells can be any suitable type of cell. In a specific example, the cell or cells are a liver cell or liver cells such as a hepatocyte or hepatocytes (e.g., human liver cell(s) or human hepatocyte(s)).

[0939] The subjects can be neonatal subjects in some methods. A neonatal subject can be a human subject up to or under the age of 1 year (52 weeks), preferably up to or under the age of 24 weeks, more preferably up to or under the age of 12 weeks, more preferably up to or under the age of 8 weeks, and even more preferably up to or under the age of 4 weeks. In certain embodiments, a neonatal human subject is up to 4 weeks of age. In certain embodiments, a neonatal human subject is up to 8 weeks of age. In another embodiment, a neonatal human subject is within 3 weeks after birth. In another embodiment, a neonatal human subject is within 2 weeks after birth. In another embodiment, a neonatal human subject is within 1 week after birth. In another embodiment, a neonatal human subject is within 7 days after birth. In another embodiment, a neonatal human subject is within 6 days after birth. In another embodiment, a neonatal human subject is within 5 days after birth. In another embodiment, a neonatal human subject is within 4 days after birth. In another embodiment, a neonatal human subject is within 3 days after birth. In another embodiment, a neonatal human subject is within 2 days after birth. In another embodiment, a neonatal human subject is within 1 day after birth. The time windows disclosed above are for human subjects and are also meant to cover the corresponding developmental time windows for other animals. As used herein, a “neonatal cell” is a cell of a neonatal subject, and a population of neonatal cells is a population of cells of a neonatal subject. In other methods, the subjects are not neonatal subjects.

[0940] In one example, provided herein are methods of introducing a nucleic acid encoding a polypeptide of interest into a cell or a population of cells in a subject. Such methods can comprise administering any of the nucleic acid constructs described herein (or any of the compositions comprising a nucleic acid construct described herein, including, for example, vectors or lipid nanoparticles) to the subject in combination with a plasma cell depleting agents or combination comprising a plasma cell depleting agent. The plasma cell depleting agent or combination comprising the plasma cell depleting agent can be administered prior to, simultaneously with, or after the nucleic acid construct. In one example, the plasma cell depleting agent or combination comprising the plasma cell depleting agent is administered prior to the nucleic acid construct. In another example, the plasma cell depleting agent or combination comprising the plasma cell depleting agent is administered prior to and after the nucleic acid construct. The nucleic acid construct can be administered together with a nuclease agent described herein, or can be administered alone. For example, the nucleic acid construct can be one that expresses the polypeptide of interest without being integrated into target genomic locus (e.g., an episomal vector or an expression vector in which the coding sequence for the polypeptide of interest is operably linked to a promoter). In some methods, the nucleic acid construct can be administered together with a nuclease agent described herein (e.g., simultaneously or sequentially in any order). The plasma cell depleting agent or combination comprising the plasma cell depleting agent can be administered prior to, simultaneously with, or after the nuclease agent. In one example, the plasma cell depleting agent or combination comprising the plasma cell depleting agent is administered prior to the nuclease agent. In another example, the plasma cell depleting agent or combination comprising the plasma cell depleting agent is administered prior to and after the nuclease agent. The nuclease agent can cleave a nuclease target sequence within a target genomic locus (e.g., target gene), the nucleic acid construct can be inserted into the target genomic locus to create a modified target genomic locus, and the polypeptide of interest can be expressed from the modified target genomic locus. The coding sequence for the polypeptide of interest can be operably linked to an endogenous promoter at the target genomic locus upon integration into the target genomic locus, or it can be operably linked to an exogenous promoter present in the nucleic acid construct. In one example, the nuclease agent is a CRISPR/Cas system, and the target gene is ALB (e.g., intron 1 of ALB). In such methods, the guide RNA can bind to the Cas protein and target the Cas protein to the guide RNA target sequence in intron 1 of the ALB gene, the Cas protein can cleave the guide RNA target sequence, the nucleic acid construct can be inserted into the ALB gene to create a modified ALB gene, and the polypeptide of interest can be expressed from the modified ALB gene.

[0941] In another example, provided herein are methods of expressing a polypeptide of interest (e.g., from a target genomic locus) in a cell or a population of cells in a subject. Such methods can comprise administering any of the nucleic acid constructs described herein (or any of the compositions comprising a nucleic acid construct described herein, including, for example, vectors or lipid nanoparticles) to the subject in combination with a plasma cell depleting agent or combination comprising a plasma cell depleting agent. The plasma cell depleting agent or combination comprising the plasma cell depleting agent can be administered prior to, simultaneously with, or after the nucleic acid construct. In one example, the plasma cell depleting agent or combination comprising the plasma cell depleting agent is administered prior to the nucleic acid construct. In another example, the plasma cell depleting agent or combination comprising the plasma cell depleting agent is administered prior to and after the nucleic acid construct. In some methods, the nucleic acid construct or composition comprising the nucleic acid construct can be administered without a nuclease agent (e.g., if the nucleic acid construct comprises elements needed for expression of the polypeptide of interest without integration into a target genomic locus). In some methods, the nucleic acid construct can be administered together with a nuclease agent described herein (e.g., simultaneously or sequentially in any order). The plasma cell depleting agent or combination comprising the plasma cell depleting agent can be administered prior to, simultaneously with, or after the nuclease agent. In one example, the plasma cell depleting agent or combination comprising the plasma cell depleting agent is administered prior to the nuclease agent. In another example, the plasma cell depleting agent or combination comprising the plasma cell depleting agent is administered prior to and after the nuclease agent. The nuclease agent can cleave a nuclease target sequence within a target genomic locus (e.g., target gene), the nucleic acid construct can be inserted into the target genomic locus to create a modified target genomic locus, and the polypeptide of interest can be expressed from the modified target genomic locus. The coding sequence for the polypeptide of interest can be operably linked to an endogenous promoter at the target genomic locus upon integration into the target genomic locus, or it can be operably linked to an exogenous promoter present in the nucleic acid construct. In one example, the nuclease agent is a CRISPR/Cas system, and the target gene is ALB (e.g., intron 1 of ALB). In such methods, the guide RNA can bind to the Cas protein and target the Cas protein to the guide RNA target sequence in intron 1 of the ALB gene, the Cas protein can cleave the guide RNA target sequence, the nucleic acid construct can be inserted into the ALB gene to create a modified ALB gene, and the polypeptide of interest can be expressed from the modified ALB gene.

[0942] In another example, provided herein are methods of inserting or integrating a nucleic acid construct into a target genomic locus in a cell or a population of cells in a subject. Such methods can comprise administering any of the nucleic acid constructs described herein (or any of the compositions comprising a nucleic acid construct described herein, including, for example, vectors or lipid nanoparticles) to the subject in combination with a plasma cell depleting agent or combination comprising the plasma cell depleting agent. The plasma cell depleting agent or combination comprising the plasma cell depleting agent can be administered prior to, simultaneously with, or after the nucleic acid construct. In one example, the plasma cell depleting agent or combination comprising the plasma cell depleting agent is administered prior to the nucleic acid construct. In another example, the plasma cell depleting agent or combination comprising the plasma cell depleting agent is administered prior to and after the nucleic acid construct. In some methods, the nucleic acid construct or composition comprising the nucleic acid construct can be administered together with a nuclease agent described herein (e.g., simultaneously or sequentially in any order). The plasma cell depleting agent or combination comprising the plasma cell depleting agent can be administered prior to, simultaneously with, or after the nuclease agent. In one example, the plasma cell depleting agent or combination comprising the plasma cell depleting agent is administered prior to the nuclease agent. In another example, the plasma cell depleting agent or combination comprising the plasma cell depleting agent is administered prior to and after the nuclease agent. The nuclease agent can cleave a nuclease target sequence within a target genomic locus (e.g., target gene), the nucleic acid construct can be inserted into the target genomic locus to create a modified target genomic locus, and the polypeptide of interest can be expressed from the modified target genomic locus. The coding sequence for the polypeptide of interest can be operably linked to an endogenous promoter at the target genomic locus upon integration into the target genomic locus, or it can be operably linked to an exogenous promoter present in the nucleic acid construct. In one example, the nuclease agent is a CRISPR/Cas system, and the target gene is ALB (e.g., intron 1 of ALB). In such methods, the guide RNA can bind to the Cas protein and target the Cas protein to the guide RNA target sequence in intron 1 of the ALB gene, the Cas protein can cleave the guide RNA target sequence, the nucleic acid construct can be inserted into the ALB gene to create a modified ALB gene, and the polypeptide of interest can be expressed from the modified ALB gene.

[0943] Also provided are methods of treating an enzyme deficiency in a subject in need thereof. Such methods can comprise administering any of the nucleic acid constructs described herein (or any of the compositions comprising a nucleic acid construct described herein, including, for example, vectors or lipid nanoparticles) to the subject in combination with a plasma cell depleting agent or combination comprising the plasma cell depleting agent such that a therapeutically effective level of polypeptide of interest expression or a therapeutically effective level of circulating polypeptide of interest is achieved in the subject. The plasma cell depleting agent or combination comprising the plasma cell depleting agent can be administered prior to, simultaneously with, or after the nucleic acid construct. In one example, the plasma cell depleting agent or combination comprising the plasma cell depleting agent is administered prior to the nucleic acid construct. In another example, the plasma cell depleting agent or combination comprising the plasma cell depleting agent is administered prior to and after the nucleic acid construct. In some methods, the nucleic acid construct or composition comprising the nucleic acid construct can be administered without a nuclease agent (e.g., if the nucleic acid construct comprises elements needed for expression of polypeptide of interest without integration into a target genomic locus). In some methods, the nucleic acid construct can be administered together with a nuclease agent described herein (e.g., simultaneously or sequentially in any order). The plasma cell depleting agent or combination comprising the plasma cell depleting agent can be administered prior to, simultaneously with, or after the nuclease agent. In one example, the plasma cell depleting agent or combination comprising the plasma cell depleting agent is administered prior to the nuclease agent. In another example, the plasma cell depleting agent or combination comprising the plasma cell depleting agent is administered prior to and after the nuclease agent. The nuclease agent can cleave a nuclease target sequence within a target genomic locus (e.g., target gene), the nucleic acid construct can be inserted into the target genomic locus to create a modified target genomic locus, and the polypeptide of interest can be expressed from the modified target genomic locus (e.g., such that a therapeutically effective level of polypeptide of interest expression or a therapeutically effective level of circulating polypeptide of interest is achieved in the subject). The coding sequence for the polypeptide of interest can be operably linked to an endogenous promoter at the target genomic locus upon integration into the target genomic locus, or it can be operably linked to an exogenous promoter present in the nucleic acid construct. In one example, the nuclease agent is a CRISPR/Cas system, and the target gene is ALB (e.g., intron 1 of ALB). In such methods, the guide RNA can bind to the Cas protein and target the Cas protein to the guide RNA target sequence in intron 1 of the ALB gene, the Cas protein can cleave the guide RNA target, the nucleic acid construct can be inserted into the ALB gene to create a modified ALB gene, and the polypeptide of interest can be expressed from the modified ALB gene (e.g., such that a therapeutically effective level of polypeptide of interest expression or a therapeutically effective level of circulating polypeptide of interest is achieved in the subject). In one example, the subject has a disease of a bleeding disorder characterized by the enzyme deficiency, a disease of an inborn error of metabolism characterized by the enzyme deficiency, or a lysosomal storage disease characterized by the enzyme deficiency. In one example, the disease is hemophilia B and the polypeptide of interest is a factor IX protein. In another example, the disease is hemophilia A and the polypeptide of interest is a factor VIII protein. In another example, the disease is Pompe disease and the polypeptide of interest is a multidomain therapeutic protein comprising a delivery domain fused to a lysosomal alpha-glucosidase.

[0944] Treatment refers to any administration or application of a therapeutic for disease or disorder in a subject, and includes inhibiting the disease, arresting its development, relieving one or more symptoms of the disease, curing the disease, or preventing reoccurrence of one or more symptoms of the disease.

[0945] Also provided are methods of preventing or reducing the onset of a sign or symptom of an enzyme deficiency in a subject (e.g., as compared to an untreated, control subject). By preventing is meant the sign or symptom of the enzyme deficiency never becomes present. Such methods can comprise administering any of the nucleic acid constructs described herein (or any of the compositions comprising a nucleic acid construct described herein, including, for example, vectors or lipid nanoparticles) to the subject in combination with a plasma cell depleting agent or combination comprising the plasma cell depleting agent such that a therapeutically effective level of polypeptide of interest expression or a therapeutically effective level of circulating polypeptide of interest is achieved in the subject. The plasma cell depleting agent or combination comprising the plasma cell depleting agent can be administered prior to, simultaneously with, or after the nucleic acid construct. In one example, the plasma cell depleting agent or combination comprising the plasma cell depleting agent is administered prior to the nucleic acid construct. In another example, the plasma cell depleting agent or combination comprising the plasma cell depleting agent is administered prior to and after the nucleic acid construct. In some methods, the nucleic acid construct or composition comprising the nucleic acid construct can be administered without a nuclease agent (e.g., if the nucleic acid construct comprises elements needed for expression of the polypeptide of interest without integration into a target genomic locus). In some methods, the nucleic acid construct can be administered together with a nuclease agent described herein (e.g., simultaneously or sequentially in any order). The plasma cell depleting agent or combination comprising the plasma cell depleting agent can be administered prior to, simultaneously with, or after the nuclease agent. In one example, the plasma cell depleting agent or combination comprising the plasma cell depleting agent is administered prior to the nuclease agent. In another example, the plasma cell depleting agent or combination comprising the plasma cell depleting agent is administered prior to and after the nuclease agent. The nuclease agent can cleave a nuclease target sequence within a target genomic locus (e.g., target gene), the nucleic acid construct can be inserted into the target genomic locus to create a modified target genomic locus, and the polypeptide of interest can be expressed from the modified target genomic locus (e.g., such that a therapeutically effective level of polypeptide of interest expression or a therapeutically effective level of circulating polypeptide of interest is achieved in the subject). The coding sequence for the polypeptide of interest can be operably linked to an endogenous promoter at the target genomic locus upon integration into the target genomic locus, or it can be operably linked to an exogenous promoter present in the nucleic acid construct. In one example, the nuclease agent is a CRISPR/Cas system, and the target gene is ALB (e.g., intron 1 of ALB). In such methods, the guide RNA can bind to the Cas protein and target the Cas protein to the guide RNA target sequence in intron 1 of the ALB gene, the Cas protein can cleave the guide RNA target, the nucleic acid construct can be inserted into the ALB gene to create a modified ALB gene, and the polypeptide of interest can be expressed from the modified ALB gene (e.g., such that a therapeutically effective level of polypeptide of interest expression or a therapeutically effective level of circulating polypeptide of interest is achieved in the subject). In one example, the subject has a disease of a bleeding disorder characterized by the enzyme deficiency, a disease of an inborn error of metabolism characterized by the enzyme deficiency, or a lysosomal storage disease characterized by the enzyme deficiency. In one example, the disease is hemophilia B and the polypeptide of interest is a factor IX protein. In another example, the disease is hemophilia A and the polypeptide of interest is a factor VIII protein. In another example, the disease is Pompe disease and the polypeptide of interest is a multidomain therapeutic protein comprising a delivery domain fused to a lysosomal alpha-glucosidase.

[0946] Any of the above methods can further comprise one or more subsequent administration steps. The subsequent administration step can comprise, for example, administering the nucleic acid construct to the subject one or more subsequent times until a desired level of expression and/or activity of the polypeptide of interest is achieved in the subject. In one example, the subsequent administration step can comprise administering to the subject one or more subsequent times: (a) the nucleic acid construct; (b) the nuclease agent or the one or more nucleic acids encoding the nuclease agent; and optionally (c) the plasma cell depleting agent or combination comprising the plasma cell depleting agent. In another example, the subsequent administration step can comprise administering to the subject one or more subsequent times: (a) the nucleic acid construct; (b) a second nuclease agent or one or more nucleic acids encoding the second nuclease agent, wherein the second nuclease agent targets a second nuclease target site in the target genomic locus, wherein the second nuclease target site is different from the first nuclease target site; and optionally (c) the plasma cell depleting agent or combination comprising the plasma cell depleting agent. In one example, the first nuclease target site can be a first location in ALB, and the second nuclease target site can be a second location in ALB. For example, the first nuclease target site can be a first location in intron 1 of ALB, and the second nuclease target site can be a second location in intron 1 of ALB. In a specific example, the first nuclease agent targets SEQ ID NO: 255 (e.g., G009860). For example, the first nuclease agent can target SEQ ID NO: 255 (e.g., G009860), and the second nuclease agent can target SEQ ID NO: 249 (e.g., G009844) (or vice versa). For example, the first nuclease agent can target SEQ ID NO: 255 (e.g., G009860), and the second nuclease agent can target SEQ ID NO: 252 (e.g., G009857) (or vice versa). For example, the first nuclease agent can target SEQ ID NO: 255 (e.g., G009860), and the second nuclease agent can target SEQ ID NO: 260 (e.g., G009874) (or vice versa). In another example, the subsequent administration step can comprise administering to the subject one or more subsequent times: (a) the nucleic acid construct; (b) a second nuclease agent or one or more nucleic acids encoding the second nuclease agent, wherein the second nuclease agent targets a second nuclease target site in a second target genomic locus that is different from the first target genomic locus (e.g., ALB is the first target genomic locus, and the second target genomic locus is different (e.g., TTR)); and optionally (c) the plasma cell depleting agent or combination comprising the plasma cell depleting agent. In one example, the first target genomic locus can be ALB (e.g., intron 1 of ALB). For example, the first target genomic locus can be ALB (e.g., intron 1 of ALB), and the second target genomic locus can be TTR (e.g., intron 1 of TTR). The subsequent administration step can be, for example, at least about 1 week, at least about 2 weeks, at least about 3 weeks, at least about 4 weeks, at least about 5 weeks, at least about 6 weeks, at least about 7 weeks, at least about 8 weeks, at least about 9 weeks, at least about 10 weeks, at least about 11 weeks, or at least about 12 weeks after the initial dosing (e.g., at least about 4 weeks after the initial dosing) or about 4 weeks to about 12 weeks, about 4 weeks to about 13 weeks, about 4 weeks to about 14 weeks, about 4 weeks to about 15 weeks, about 4 weeks to about 16 weeks, about 1 week to about 12 weeks, about 2 weeks to about 12 weeks, about 3 weeks to about 12 weeks, about 1 week to about 15 weeks, about 2 week to about 14 weeks, or about 3 weeks to about 13 weeks after the initial dosing (e.g., about 4 weeks to about 12 weeks after the initial dosing). Such methods can further comprise the following steps prior to the subsequent administration step: (i) measuring expression and/or activity of the polypeptide of interest in the subject; and (ii) determining the dose of the nucleic acid construct and the nuclease agent or the one or more nucleic acids encoding the nuclease agent for the subsequent administration step in order to achieve the desired level of expression and/or activity of the polypeptide of interest in the subject. The measuring can be, for example, at least 1 week, at least 2 weeks, at least 3 weeks, or at least 4 weeks after dosing (e.g., at least 4 weeks after dosing) or can be from about 1 week to about 7 weeks, about 2 weeks to about 6 weeks, about 3 weeks to about 5 weeks, about 4 weeks, about 1 week to about 4 weeks, about 2 weeks to about 4 weeks, about 3 weeks to about 4 weeks, about 4 weeks to about 5 weeks, about 4 weeks to about 6 weeks, or about 4 weeks to about 7 weeks after dosing. In one specific example, the polypeptide of interest is a factor IX protein, and the desired expression level of the factor IX protein in the subject is a serum level of at least about 0.5 μg/mL, at least about 1 μg/mL, at least about 1.5 μg/mL, at least about 2 μg/mL, at least about 2.5 μg/mL, at least about 3 μg/mL, at least about 3.5 μg/mL, at least about 4 μg/mL, at least about 4.5 μg/mL, or at least about 5 μg/mL or about 1 to about 5, about 2 to about 5, or about 3 to about 5 μg/mL (e.g., a serum level of at least about 3 μg/mL or about 3 to about 5 μg/mL). In another specific example, the polypeptide of interest is a multidomain therapeutic protein comprising a delivery domain fused to a lysosomal alpha-glucosidase, and the desired expression level of the multidomain therapeutic protein in the subject is a serum level of at least about 0.5 μg/mL, at least about 1 μg/mL, at least about 1.5 μg/mL, at least about 2 μg/mL, at least about 2.5 μg/mL, at least about 3 μg/mL, at least about 3.5 μg/mL, at least about 4 μg/mL, at least about 4.5 μg/mL, or at least about 5 μg/mL (e.g., a serum level of at least about 2 μg/mL or at least about 5 μg/mL or about 2 to about 50 μg/mL).

[0947] Alternatively, the subsequent administration step can comprise, for example, administering a second nucleic acid construct comprising a second coding sequence for the polypeptide of interest (e.g., wherein the second coding sequence is different from the first coding sequence) to the subject one or more subsequent times until a desired level of expression and/or activity of the polypeptide of interest is achieved in the subject. In one example, the subsequent administration step can comprise administering to the subject one or more subsequent times: (a) a second nucleic acid construct comprising a second coding sequence for the polypeptide of interest, wherein the second coding sequence is different from the first coding sequence; (b) (i) the first nuclease agent or the one or more nucleic acids encoding the first nuclease agent; (ii) a second nuclease agent or one or more nucleic acids encoding the second nuclease agent, wherein the second nuclease agent targets a second nuclease target site in the target genomic locus, wherein the second nuclease target site is different from the first nuclease target site; or (iii) a second nuclease agent or one or more nucleic acids encoding the second nuclease agent, wherein the second nuclease agent targets a second nuclease target site in a second target genomic locus that is different from the first target genomic locus (e.g., ALB is the first target genomic locus, and the second target genomic locus is different (e.g., TTR)); and optionally (c) the plasma cell depleting agent or combination comprising the plasma cell depleting agent. In one example, the first nuclease target site can be a first location in ALB, and the second nuclease target site can be a second location in ALB. For example, the first nuclease target site can be a first location in intron 1 of ALB, and the second nuclease target site can be a second location in intron 1 of ALB. In a specific example, the first nuclease agent targets SEQ ID NO: 255 (e.g., G009860). For example, the first nuclease agent can target SEQ ID NO: 255 (e.g., G009860), and the second nuclease agent can target SEQ ID NO: 249 (e.g., G009844) (or vice versa). For example, the first nuclease agent can target SEQ ID NO: 255 (e.g., G009860), and the second nuclease agent can target SEQ ID NO: 252 (e.g., G009857) (or vice versa). For example, the first nuclease agent can target SEQ ID NO: 255 (e.g., G009860), and the second nuclease agent can target SEQ ID NO: 260 (e.g., G009874) (or vice versa). In one example, the first target genomic locus can be ALB (e.g., intron 1 of ALB). For example, the first target genomic locus can be ALB (e.g., intron 1 of ALB), and the second target genomic locus can be TTR (e.g., intron 1 of TTR). The subsequent administration step can be, for example, at least about 1 week, at least about 2 weeks, at least about 3 weeks, at least about 4 weeks, at least about 5 weeks, at least about 6 weeks, at least about 7 weeks, at least about 8 weeks, at least about 9 weeks, at least about 10 weeks, at least about 11 weeks, or at least about 12 weeks after the initial dosing (e.g., at least about 4 weeks after the initial dosing) or about 4 weeks to about 12 weeks, about 4 weeks to about 13 weeks, about 4 weeks to about 14 weeks, about 4 weeks to about 15 weeks, about 4 weeks to about 16 weeks, about 1 week to about 12 weeks, about 2 weeks to about 12 weeks, about 3 weeks to about 12 weeks, about 1 week to about 15 weeks, about 2 week to about 14 weeks, or about 3 weeks to about 13 weeks after the initial dosing (e.g., about 4 weeks to about 12 weeks after the initial dosing). Such methods can further comprise the following steps prior to the subsequent administration step: (i) measuring expression and/or activity of the polypeptide of interest in the subject; and (ii) determining the dose of the nucleic acid construct and the nuclease agent or the one or more nucleic acids encoding the nuclease agent for the subsequent administration step in order to achieve the desired level of expression and/or activity of the polypeptide of interest in the subject. The measuring can be, for example, at least 1 week, at least 2 weeks, at least 3 weeks, or at least 4 weeks after dosing (e.g., at least 4 weeks after dosing) or can be from about 1 week to about 7 weeks, about 2 weeks to about 6 weeks, about 3 weeks to about 5 weeks, about 4 weeks, about 1 week to about 4 weeks, about 2 weeks to about 4 weeks, about 3 weeks to about 4 weeks, about 4 weeks to about 5 weeks, about 4 weeks to about 6 weeks, or about 4 weeks to about 7 weeks after dosing. In one specific example, the polypeptide of interest is a factor IX protein, and the desired expression level of the factor IX protein in the subject is a serum level of at least about 0.5 μg/mL, at least about 1 μg/mL, at least about 1.5 μg/mL, at least about 2 μg/mL, at least about 2.5 μg/mL, at least about 3 μg/mL, at least about 3.5 μg/mL, at least about 4 μg/mL, at least about 4.5 μg/mL, or at least about 5 μg/mL or about 1 to about 5, about 2 to about 5, or about 3 to about 5 μg/mL (e.g., a serum level of at least about 3 μg/mL or at least about 5 μg/mL or about 3-5 μg/mL). In another specific example, the polypeptide of interest is a multidomain therapeutic protein comprising a delivery domain fused to a lysosomal alpha-glucosidase, and the desired expression level of the multidomain therapeutic protein in the subject is a serum level of at least about 0.5 μg/mL, at least about 1 μg/mL, at least about 1.5 μg/mL, at least about 2 μg/mL, at least about 2.5 μg/mL, at least about 3 μg/mL, at least about 3.5 μg/mL, at least about 4 μg/mL, at least about 4.5 μg/mL, or at least about 5 μg/mL (e.g., a serum level of at least about 2 μg/mL or at least about 5 μg/mL).

[0948] Alternatively, the subsequent administration step can comprise, for example, administering a second nucleic acid construct comprising a coding sequence for a second polypeptide of interest (e.g., that is different from the first polypeptide of interest) to the subject one or more subsequent times until a desired level of expression and/or activity of the polypeptide of interest is achieved in the subject. In one example, the subsequent administration step can comprise administering to the subject one or more subsequent times: (a) a second nucleic acid construct comprising a coding sequence for a second polypeptide of interest that is different from the first polypeptide of interest; (b) (i) the first nuclease agent or the one or more nucleic acids encoding the first nuclease agent; (ii) a second nuclease agent or one or more nucleic acids encoding the second nuclease agent, wherein the second nuclease agent targets a second nuclease target site in the target genomic locus, wherein the second nuclease target site is different from the first nuclease target site; or (iii) a second nuclease agent or one or more nucleic acids encoding the second nuclease agent, wherein the second nuclease agent targets a second nuclease target site in a second target genomic locus that is different from the first target genomic locus (e.g., ALB is the first target genomic locus, and the second target genomic locus is different (e.g., TTR)); and optionally (c) the plasma cell depleting agent or combination comprising the plasma cell depleting agent. In one example, the first nuclease target site can be a first location in ALB, and the second nuclease target site can be a second location in ALB. For example, the first nuclease target site can be a first location in intron 1 of ALB, and the second nuclease target site can be a second location in intron 1 of ALB. In a specific example, the first nuclease agent targets SEQ ID NO: 255 (e.g., G009860). For example, the first nuclease agent can target SEQ ID NO: 255 (e.g., G009860), and the second nuclease agent can target SEQ ID NO: 249 (e.g., G009844) (or vice versa). For example, the first nuclease agent can target SEQ ID NO: 255 (e.g., G009860), and the second nuclease agent can target SEQ ID NO: 252 (e.g., G009857) (or vice versa). For example, the first nuclease agent can target SEQ ID NO: 255 (e.g., G009860), and the second nuclease agent can target SEQ ID NO: 260 (e.g., G009874) (or vice versa). In one example, the first target genomic locus can be ALB (e.g., intron 1 of ALB). For example, the first target genomic locus can be ALB (e.g., intron 1 of ALB), and the second target genomic locus can be TTR (e.g., intron 1 of TTR). The subsequent administration step can be, for example, at least about 1 week, at least about 2 weeks, at least about 3 weeks, at least about 4 weeks, at least about 5 weeks, at least about 6 weeks, at least about 7 weeks, at least about 8 weeks, at least about 9 weeks, at least about 10 weeks, at least about 11 weeks, or at least about 12 weeks after the initial dosing (e.g., at least about 4 weeks after the initial dosing) or about 4 weeks to about 12 weeks, about 4 weeks to about 13 weeks, about 4 weeks to about 14 weeks, about 4 weeks to about 15 weeks, about 4 weeks to about 16 weeks, about 1 week to about 12 weeks, about 2 weeks to about 12 weeks, about 3 weeks to about 12 weeks, about 1 week to about 15 weeks, about 2 week to about 14 weeks, or about 3 weeks to about 13 weeks after the initial dosing (e.g., about 4 weeks to about 12 weeks after the initial dosing).

[0949] In some methods, the one or more subsequent administration steps is one subsequent administration step. In some methods, the one or more subsequent administration steps is two subsequent administration steps or comprises at least two subsequent administration steps. In some methods, the one or more subsequent administration steps is three subsequent administration steps or comprises at least three subsequent administration steps. In some methods, the one or more subsequent administration steps is four subsequent administration steps or comprises at least four subsequent administration steps.

[0950] In some methods, the plasma cell depleting agent or combination comprising the plasma cell depleting agent is administered in the one or more subsequent administration steps if there is no plasma cell depleting agent or combination comprising the plasma cell depleting agent in the subject. In some methods, the plasma cell depleting agent or combination comprising the plasma cell depleting agent is administered in the one or more subsequent administration steps if preexisting expression and/or activity levels of plasma cell depleting agent or combination comprising the plasma cell depleting agent are below a desired threshold level (i.e., the level necessary to achieve the desired effect). In some methods, the method comprises measuring expression and/or activity levels of the plasma cell depleting agent or combination comprising the plasma cell depleting agent prior to the one or more subsequent administration steps.

[0951] In some methods, a therapeutically effective amount of the nucleic acid construct or the composition comprising the nucleic acid construct or the combination of the nucleic acid construct and the plasma cell depleting agent or combination comprising the plasma cell depleting agent and the nuclease agent (e.g., CRISPR/Cas system) is administered to the subject. A therapeutically effective amount is an amount that produces the desired effect for which it is administered. The exact amount will depend on the purpose of the treatment, and will be ascertainable by one skilled in the art using known techniques. See, e.g., Lloyd (1999) The Art, Science and Technology of Pharmaceutical Compounding. Use multiple administration steps can, in some methods, enable use of lower doses of nucleic acid construct and/or nuclease agent for administration to the subject as compared to methods in which only a single administration step is used. For example, if 2-3 administration steps are used, the dose of nucleic acid construct and/or nuclease agent can, in some methods, be 2-3× lower than the dose used in methods in which only a single administration step is used.

[0952] Therapeutic or pharmaceutical compositions comprising the compositions disclosed herein can be administered with suitable carriers, excipients, and other agents that are incorporated into formulations to provide improved transfer, delivery, tolerance, and the like. A multitude of appropriate formulations can be found in the formulary known to all pharmaceutical chemists: Remington's Pharmaceutical Sciences, Mack Publishing Company, Easton, PA. See also Powell et al. “Compendium of excipients for parenteral formulations” PDA (1998) J. Pharm. Sci. Technol. 52:238-311. In certain embodiments, the pharmaceutical compositions are non-pyrogenic.

[0953] In methods in which a nucleic acid construct is genomically integrated, any target genomic locus capable of expressing a gene can be used, such as a safe harbor locus (safe harbor gene) or an endogenous locus that would normally encode the polypeptide of interest (e.g., a F9 locus for Factor IX). Such loci are described in more detail elsewhere herein. In a specific example, the target genomic locus can be an endogenous ALB locus, such as an endogenous human ALB locus. For example, the nucleic acid construct can be genomically integrated in intron 1 of the endogenous ALB locus. Endogenous ALB exon 1 can then splice into the coding sequence for the multidomain therapeutic protein in the nucleic acid construct.

[0954] Targeted insertion of the nucleic acid construct comprising the coding sequence for the polypeptide of interest into a target genomic locus, and particularly an endogenous ALB locus, offers multiple advantages. Such methods result in stable modification to allow for stable, long-term expression of the coding sequence for the polypeptide of interest. With respect to the ALB locus, such methods are able to utilize the endogenous ALB promoter and regulatory regions to achieve therapeutically effective levels of expression. For example, the coding sequence for the polypeptide of interest in the nucleic acid construct can comprise a promoterless gene, and the inserted nucleic acid construct can be operably linked to an endogenous promoter in the target genomic locus (e.g., ALB locus). Use of an endogenous promoter is advantageous because it obviates the need for inclusion of a promoter in the nucleic acid construct, allowing packaging of larger transgenes that may not normally package efficiently (e.g., in AAV). Alternatively, the coding sequence for the polypeptide of interest in the nucleic acid construct can be operably linked to an exogenous promoter in the nucleic acid construct. Examples of types of promoters that can be used are disclosed elsewhere herein.

[0955] Optionally, some or all of the endogenous gene (e.g., endogenous ALB gene) at the target genomic locus can be expressed upon insertion of the multidomain therapeutic protein coding sequence from the nucleic acid construct. Alternatively, in some methods, none of the endogenous gene at the target genomic locus is expressed. As one example, the modified target genomic locus (e.g., modified ALB locus) after integration of the nucleic acid construct can encode a chimeric protein comprising an endogenous secretion signal (e.g., albumin secretion signal) and the polypeptide of interest encoded by the nucleic acid construct. In another example, the first intron of an ALB locus can be targeted. The secretion signal peptide of ALB is encoded by exon 1 of the ALB gene. In such a scenario, a promoterless cassette bearing a splice acceptor and the coding sequence for the polypeptide of interest will support expression and secretion of the polypeptide of interest. Splicing between endogenous ALB exon 1 and the integrated coding sequence for the polypeptide of interest creates a chimeric mRNA and protein including the endogenous ALB sequence encoded by exon 1 operably linked to the coding sequence for the polypeptide of interest encoded by the integrated nucleic acid construct.

[0956] The nucleic acid construct can be inserted into the target genomic locus by any means, including homologous recombination (HR) and non-homologous end joining (NHEJ) as described elsewhere herein. In a specific example, the nucleic acid construct is inserted by NHEJ (e.g., does not comprise a homology arm and is inserted by NHEJ).

[0957] In another specific example, the nucleic acid construct can be inserted via homology-independent targeted integration (e.g., directional homology-independent targeted integration). For example, the coding sequence for the polypeptide of interest in the nucleic acid construct can be flanked on each side by a target site for a nuclease agent (e.g., the same target site as in the target genomic locus, and the same nuclease agent being used to cleave the target site in the target genomic locus). The nuclease agent can then cleave the target sites flanking the coding sequence for the polypeptide of interest. In a specific example, the nucleic acid construct is delivered AAV-mediated delivery, and cleavage of the target sites flanking the coding sequence for the polypeptide of interest can remove the inverted terminal repeats (ITRs) of the AAV. Removal of the ITRs can make it easier to assess successful targeting, because presence of the ITRs can hamper sequencing efforts due to the repeated sequences. In some methods, the target site in the target genomic locus (e.g., a gRNA target sequence including the flanking protospacer adjacent motif) is no longer present if the coding sequence for the polypeptide of interest is inserted into the target genomic locus in the correct orientation but it is reformed if the coding sequence for the polypeptide of interest is inserted into the target genomic locus in the opposite orientation. This can help ensure that the coding sequence for the is inserted in the correct orientation for expression.

[0958] In any of the above methods, the plasma cell depleting agent or combination comprising the plasma cell depleting agent can be administered simultaneously with the nucleic acid construct and/or nuclease agent (e.g., CRISPR/Cas system) or not simultaneously (e.g., sequentially in any combination). For example, in a method comprising administering a composition or combination comprising a plasma cell depleting agent or combination comprising the plasma cell depleting agent, a nucleic acid construct, and a nuclease agent, they can be administered separately (e.g., the plasma cell depleting agent or combination comprising the plasma cell depleting agent separately from the nucleic acid construct and/or nuclease agent). For example, the plasma cell depleting agent or combination comprising the plasma cell depleting agent can be administered prior to the nucleic acid construct and/or nuclease agent, subsequent to the nucleic acid construct and/or nuclease agent, prior to and subsequent to the nucleic acid construct and/or nuclease agent, or at the same time as the nucleic acid construct and/or nuclease agent. Any suitable methods of administering plasma cell depleting agents or combinations comprising a plasma cell depleting agent, nucleic acid constructs, and nuclease agents to cells can be used (particularly methods of administering to the liver for the nucleic acid constructs and nuclease agents), and examples of such methods are described in more detail elsewhere herein.

[0959] In methods in which a composition or combination comprising a plasma cell depleting agent or combination comprising the plasma cell depleting agent, a nucleic acid construct (or vector or LNP), and a nuclease agent is administered (i.e., in methods in which a plasma cell depleting agent or combination comprising the plasma cell depleting agent, a nucleic acid construct (or vector or LNP), and a nuclease agent are both administered), the plasma cell depleting agent or combination comprising the plasma cell depleting agent, the nucleic acid construct, and the nuclease agent can be administered simultaneously. Alternatively, the plasma cell depleting agent or combination comprising the plasma cell depleting agent and the nucleic acid construct and the nuclease agent can be administered sequentially in any order. For example, the plasma cell depleting agent or combination comprising the plasma cell depleting agent can be administered prior to and/or after the nucleic acid construct and/or nuclease agent. In one example, the plasma cell depleting agent or combination comprising the plasma cell depleting agent can be administered prior to and after the nucleic acid construct and/or nuclease agent. In another example, the plasma cell depleting agent or combination comprising the plasma cell depleting agent can be administered simultaneously with and after the nucleic acid construct and/or nuclease agent.

[0960] In one example, the plasma cell depleting agent or combination comprising the plasma cell depleting agent can be administered about 1 hour to about 48 hours, about 1 hour to about 24 hours, about 1 hour to about 12 hours, about 1 hour to about 6 hours, about 1 hour to about 2 hours, about 2 hours to about 48 hours, about 2 hours to about 24 hours, about 2 hours to about 12 hours, about 2 hours to about 6 hours, about 3 hours to about 48 hours, about 6 hours to about 48 hours, about 12 hours to about 48 hours, or about 24 hours to about 48 hours prior to and/or subsequent to administration of the nucleic acid construct and/or nuclease agent.

[0961] In one example, the plasma cell depleting agent or combination comprising the plasma cell depleting agent is administered about 4 hours, about 8 hours, about 12 hours, about 18 hours, about 1 day, about 2 days, about 3 days, about 4 days, about 5 days, about 6 days, or about 1 week prior to administering the nucleic acid construct and/or nuclease agent. In another example, the plasma cell depleting agent or combination comprising the plasma cell depleting agent is administered at least about 4 hours, at least about 8 hours, at least about 12 hours, at least about 18 hours, at least about 1 day, at least about 2 days, at least about 3 days, at least about 4 days, at least about 5 days, at least about 6 days, or at least about 1 week prior to administering the nucleic acid construct and/or nuclease agent. In another example, the plasma cell depleting agent or combination comprising the plasma cell depleting agent is administered about 4 hours to about 24 hours, about 4 hours to about 12 hours, about 4 hours to about 8 hours, about 8 hours to about 24 hours, about 12 hours to about 24 hours, about 1 day to about 7 days, about 1 day to about 6 days, about 1 day to about 5 days, about 1 day to about 4 days, about 1 day to about 3 days, about 1 day to about 2 days, about 2 days to about 7 days, about 3 days to about 7 days, about 4 days to about 7 days, about 5 days to about 7 days, about 6 days to about 7 days, or about 1 day to about 3 days prior to administering the nucleic acid construct and/or nuclease agent.

[0962] In one example, the plasma cell depleting agent or combination comprising the plasma cell depleting agent is administered about 1 week prior to administering the nucleic acid construct and/or nuclease agent. In another example, the plasma cell depleting agent or combination comprising the plasma cell depleting agent is administered within about 1 week prior to administering the nucleic acid construct and/or nuclease agent. In another example, the plasma cell depleting agent or combination comprising the plasma cell depleting agent is administered at least about 1 day, at least about 2 days, at least about 3 days, at least about 4 days, at least about 5 days, at least about 6 days, or at least about 1 week prior to administering the nucleic acid construct and/or nuclease agent. In another example, the plasma cell depleting agent or combination comprising the plasma cell depleting agent is administered about 1 day, about 2 days, about 3 days, about 4 days, about 5 days, about 6 days, or about 1 week prior to administering the nucleic acid construct and/or nuclease agent. In another example, the plasma cell depleting agent or combination comprising the plasma cell depleting agent is administered about 1 day to about 6 days, about 1 day to about 5 days, about 1 day to about 4 days, about 1 day to about 3 days, about 1 day to about 2 days, about 2 days to about 7 days, about 3 days to about 7 days, about 4 days to about 7 days, about 5 days to about 7 days, or about 6 days to about 7 days prior to administering the nucleic acid construct and/or nuclease agent.

[0963] In one example, the plasma cell depleting agent or combination comprising the plasma cell depleting agent is administered about 4 hours, about 8 hours, about 12 hours, about 18 hours, about 1 day, about 2 days, about 3 days, about 4 days, about 5 days, about 6 days, or about 1 week prior to and subsequent to administering the nucleic acid construct and/or nuclease agent. In another example, the plasma cell depleting agent or combination comprising the plasma cell depleting agent is administered at least about 4 hours, at least about 8 hours, at least about 12 hours, at least about 18 hours, at least about 1 day, at least about 2 days, at least about 3 days, at least about 4 days, at least about 5 days, at least about 6 days, or at least about 1 week prior to and subsequent to administering the nucleic acid construct and/or nuclease agent. In another example, the plasma cell depleting agent or combination comprising the plasma cell depleting agent is administered about 4 hours to about 24 hours, about 4 hours to about 12 hours, about 4 hours to about 8 hours, about 8 hours to about 24 hours, about 12 hours to about 24 hours, about 1 day to about 7 days, about 1 day to about 6 days, about 1 day to about 5 days, about 1 day to about 4 days, about 1 day to about 3 days, about 1 day to about 2 days, about 2 days to about 7 days, about 3 days to about 7 days, about 4 days to about 7 days, about 5 days to about 7 days, about 6 days to about 7 days, or about 1 day to about 3 days prior to and subsequent to administering the nucleic acid construct and/or nuclease agent.

[0964] In one example, the plasma cell depleting agent or combination comprising the plasma cell depleting agent is administered about 4 hours, about 8 hours, about 12 hours, about 18 hours, about 1 day, about 2 days, about 3 days, about 4 days, about 5 days, about 6 days, or about 1 week after administering the nucleic acid construct and/or nuclease agent. In another example, the plasma cell depleting agent or combination comprising the plasma cell depleting agent is administered at least about 4 hours, at least about 8 hours, at least about 12 hours, at least about 18 hours, at least about 1 day, at least about 2 days, at least about 3 days, at least about 4 days, at least about 5 days, at least about 6 days, or at least about 1 week after administering the nucleic acid construct and/or nuclease agent. In another example, the plasma cell depleting agent or combination comprising the plasma cell depleting agent is administered about 4 hours to about 24 hours, about 4 hours to about 12 hours, about 4 hours to about 8 hours, about 8 hours to about 24 hours, about 12 hours to about 24 hours, about 1 day to about 7 days, about 1 day to about 6 days, about 1 day to about 5 days, about 1 day to about 4 days, about 1 day to about 3 days, about 1 day to about 2 days, about 2 days to about 7 days, about 3 days to about 7 days, about 4 days to about 7 days, about 5 days to about 7 days, about 6 days to about 7 days, or about 1 day to about 3 days after administering the nucleic acid construct and/or nuclease agent.

[0965] In one example, the plasma cell depleting agent or combination comprising the plasma cell depleting agent is administered within about 1 month, within about 2 months, within about 3 months, within about 4 months, within about 5 months, within about 6 months, or within about 12 months after administering the nucleic acid construct and/or nuclease agent. In another example, the plasma cell depleting agent or combination comprising the plasma cell depleting agent is administered within about 6 months after administering the nucleic acid construct and/or nuclease agent. In another example, the plasma cell depleting agent or combination comprising the plasma cell depleting agent is administered about 1 month, about 2 months, about 3 months, about 4 months, about 5 months, or about 6 months after administering the nucleic acid construct and/or nuclease agent. In another example, the plasma cell depleting agent or combination comprising the plasma cell depleting agent is administered about 1 to about 6 months, about 2 to about 6 months, about 3 to about 6 months, about 4 to about 6 months, about 5 to about 6 months, about 1 to about 5 months, about 1 to about 4 months, about 1 to about 3 months, or about 1 to about 2 months after administering the nucleic acid construct and/or nuclease agent. In another example, the plasma cell depleting agent or combination comprising the plasma cell depleting agent is administered more than 6 months after administering the nucleic acid construct and/or nuclease agent. In another example, the plasma cell depleting agent or combination comprising the plasma cell depleting agent is administered about 1 to about 12 months or about 6 months to about 12 months after administering the nucleic acid construct and/or nuclease agent. In some methods, the method can comprise determining whether the nucleic acid construct and/or the nuclease agent are present in the subject (e.g., from a previous administration). The method can then comprise administering the plasma cell depleting agent or combination comprising the plasma cell depleting agent if the nucleic acid construct and/or the nuclease agent are still present in the subject. For example, if the nucleic acid construct is delivered in a viral vector (e.g., a recombinant AAV vector), the method can comprise determining whether the viral vector is present in the subject. The method can then comprise administering the plasma cell depleting agent or combination comprising the plasma cell depleting agent if the viral vector is still present (i.e., detectable) in the subject. For example, if the nucleic acid construct is delivered in a viral vector (e.g., a recombinant AAV vector), the method can comprise determining whether viral capsid protein (e.g., AAV capsid protein) is present in the subject. The method can then comprise administering the plasma cell depleting agent or combination comprising the plasma cell depleting agent if the capsid protein is still present (i.e., detectable) in the subject. For example, if the nuclease agent is delivered in a lipid nanoparticle, the method can comprise determining whether the lipid nanoparticle components (e.g., PEG) are present in the subject. The method can then comprise administering the plasma cell depleting agent or combination comprising the plasma cell depleting agent if the lipid nanoparticle components are still present (i.e., detectable) in the subject. For example, if the nuclease agent is delivered in a lipid nanoparticle, the method can comprise determining whether certain lipid nanoparticle components are present in the subject. The method can then comprise administering the plasma cell depleting agent or combination comprising the plasma cell depleting agent if the components still present (i.e., detectable) in the subject.

[0966] The B cell depleting agents (e.g., anti-CD20×CD3 antigen binding molecules), nucleic acid constructs, nuclease agents and CRISPR/Cas systems, and compositions disclosed herein can be used in methods of introducing a nucleic acid construct encoding a polypeptide of interest in a cell or population of cells in a subject, methods of inserting or integrating a nucleic acid construct encoding a polypeptide of interest into a target genomic locus in a cell or population of cells in a subject, methods of expressing a polypeptide of interest (e.g., from a target genomic locus) in a cell or population of cells in a subject, methods of treating an enzyme deficiency in a subject, and methods or preventing or reducing the onset of a sign or symptom an enzyme deficiency in a subject. In some embodiments, the subject does not have preexisting immunity against the nucleic acid construct, the polypeptide of interest encoded by the nucleic acid construct, the nuclease agent or one or more nucleic acids encoding the nuclease agent, or a delivery vehicle for the nucleic acid construct, the nuclease agent, or the one or more nucleic acids encoding the nuclease agent. In one example, the enzyme deficiency is FIX deficiency or the disease is hemophilia B. In another example, the enzyme deficiency is GAA deficiency or the disease is Pompe disease. In another example, the enzyme deficiency is FVIII deficiency or the disease is hemophilia A. In other methods (e.g., where a nucleic acid construct encodes a neutralizing antigen-binding protein as disclosed herein), the methods can be for treating an infectious disease (e.g., bacterial or viral) or treating a cancer. The B cell depleting agents can inhibit or prevent an immune response to an immunogen (e.g., nucleic acid construct, nuclease agent or CRISPR/Cas system, e.g., in an immunogenic delivery vehicle) (e.g., an immunogenic delivery vehicle) in a subject in need thereof or can inhibit or prevent generation of antibodies (e.g., neutralizing antibodies) to an immunogen (e.g., nucleic acid construct, nuclease agent or CRISPR/Cas system, e.g., in an immunogenic delivery vehicle) (e.g., an immunogenic delivery vehicle) in a subject in need thereof. In some embodiments, a plasma cell depleting agent is not administered to the subject (e.g., a subject without preexisting immunity to the nucleic acid construct, the polypeptide of interest encoded by the nucleic acid construct, the nuclease agent or one or more nucleic acids encoding the nuclease agent, or a delivery vehicle for the nucleic acid construct, the nuclease agent, or the one or more nucleic acids encoding the nuclease agent, such as, e.g., AAV) simultaneously with the B cell depleting agent. In some embodiments, an immunoglobulin depleting agent is not administered to the subject (e.g., a subject without preexisting immunity against the nucleic acid construct, the polypeptide of interest encoded by the nucleic acid construct, the nuclease agent or one or more nucleic acids encoding the nuclease agent, or a delivery vehicle for the nucleic acid construct, the nuclease agent, or the one or more nucleic acids encoding the nuclease agent, such as, e.g., AAV) simultaneously with the B cell depleting agent. In some embodiments, neither a plasma cell depleting agent nor an immunoglobulin depleting agent is administered to the subject (e.g., a subject without preexisting immunity to the nucleic acid construct, the polypeptide of interest encoded by the nucleic acid construct, the nuclease agent or one or more nucleic acids encoding the nuclease agent, or a delivery vehicle for the nucleic acid construct, the nuclease agent, or the one or more nucleic acids encoding the nuclease agent, such as, e.g., AAV) simultaneously with the B cell depleting agent. In some embodiments, a plasma cell depleting agent is not administered to the subject (e.g., a subject without preexisting immunity to the nucleic acid construct, the polypeptide of interest encoded by the nucleic acid construct, the nuclease agent or one or more nucleic acids encoding the nuclease agent, or a delivery vehicle for the nucleic acid construct, the nuclease agent, or the one or more nucleic acids encoding the nuclease agent, such as, e.g., AAV) in combination with the B cell depleting agent. In some embodiments, an immunoglobulin depleting agent is not administered to the subject (e.g., a subject without preexisting immunity to the nucleic acid construct, the polypeptide of interest encoded by the nucleic acid construct, the nuclease agent or one or more nucleic acids encoding the nuclease agent, or a delivery vehicle for the nucleic acid construct, the nuclease agent, or the one or more nucleic acids encoding the nuclease agent, such as, e.g., AAV) in combination with the B cell depleting agent. In some embodiments, neither a plasma cell depleting agent nor an immunoglobulin depleting agent is administered to the subject (e.g., a subject without preexisting immunity to the nucleic acid construct, the polypeptide of interest encoded by the nucleic acid construct, the nuclease agent or one or more nucleic acids encoding the nuclease agent, or a delivery vehicle for the nucleic acid construct, the nuclease agent, or the one or more nucleic acids encoding the nuclease agent, such as, e.g., AAV) in combination with the B cell depleting agent. The term “immune response” refers to a response of a cell of the immune system (e.g., a B-cell, T-cell, macrophage or polymorphonucleocyte) to a stimulus such as an immunogen, e.g., an antigen (e.g., a viral antigen). Active immune responses can involve differentiation and proliferation of immunocompetent cells, which leads to synthesis of antibodies or the development of cell-mediated reactivity, or both. An active immune response can be mounted by the host after exposure to an antigen (e.g., by infection or by vaccination). Active immune response can be contrasted with passive immunity, which can be acquired through the transfer of substances such as, e.g., an antibody, transfer factor, thymic graft, and/or cytokines from an actively immunized host to a non-immune host. In some embodiments, the immune response is a humoral (antibody producing) immune response and/or a cell-mediated immune response in a subject (e.g., a human).

[0967] An antibody may be capable of both binding and neutralizing a viral particle or a portion thereof (e.g., neutralizing antibody (nAb)). In some embodiments, the antibody may affect pharmacokinetic properties or alter uptake of AAV into different cell types. In some embodiments, neutralizing (or neutralize or neutralization and the like) in the context of the present disclosure may comprise an effect of immunoglobulins, such as antibodies generated in a host immune response, in reducing the efficacy and/or delivery of a viral particle. As an example, neutralization by an at least one nAb described herein may be realized such that the nAb is directed to the viral particle surface (e.g., capsid protein) which may result in aggregation of viral particles and/or may be realized by inhibition of the fusion of viral and a cellular membrane(s) after attachment of the viral particle to a target cell, by inhibition of endocytosis, and/or by inhibition of production of viral progeny. In various embodiments, an antibody generated in a subject's host immune response can play a neutralizing role thereby causing the delivery effectiveness of the viral particle to be reduced or eliminated. In some embodiments, the induced and/or preexisting host immunity may comprise B and/or T cell immune responses described herein. The blockade and/or suppression of induced and/or preexisting host immunity against viral particles or portions thereof, can improve viral transduction and allow for effective re-administration (i.e., re-dosing) of the viral particles during gene therapy.

[0968] In any of the methods, the subject can be from any suitable species, such as eukaryotic or mammalian subjects (e.g., non-human mammalian subject or human subject). A mammal can be, for example, a non-human mammal, a human, a rodent, a rat, a mouse, or a hamster. Other non-human mammals include, for example, non-human primates, e.g., monkeys and apes. The term “non-human” excludes humans. Specific examples include, but are not limited to, humans, rodents, mice, rats, and non-human primates. In a specific example, the subject is a human. Likewise, cells can be any suitable type of cell. In a specific example, the cell or cells are a liver cell or liver cells such as a hepatocyte or hepatocytes (e.g., human liver cell(s) or human hepatocyte(s)).

[0969] The subjects can be neonatal subjects in some methods. A neonatal subject can be a human subject up to or under the age of 1 year (52 weeks), preferably up to or under the age of 24 weeks, more preferably up to or under the age of 12 weeks, more preferably up to or under the age of 8 weeks, and even more preferably up to or under the age of 4 weeks. In certain embodiments, a neonatal human subject is up to 4 weeks of age. In certain embodiments, a neonatal human subject is up to 8 weeks of age. In another embodiment, a neonatal human subject is within 3 weeks after birth. In another embodiment, a neonatal human subject is within 2 weeks after birth. In another embodiment, a neonatal human subject is within 1 week after birth. In another embodiment, a neonatal human subject is within 7 days after birth. In another embodiment, a neonatal human subject is within 6 days after birth. In another embodiment, a neonatal human subject is within 5 days after birth. In another embodiment, a neonatal human subject is within 4 days after birth. In another embodiment, a neonatal human subject is within 3 days after birth. In another embodiment, a neonatal human subject is within 2 days after birth. In another embodiment, a neonatal human subject is within 1 day after birth. The time windows disclosed above are for human subjects and are also meant to cover the corresponding developmental time windows for other animals. As used herein, a “neonatal cell” is a cell of a neonatal subject, and a population of neonatal cells is a population of cells of a neonatal subject. In other methods, the subjects are not neonatal subjects.

[0970] In one example, provided herein are methods of introducing a nucleic acid encoding a polypeptide of interest into a cell or a population of cells in a subject. Such methods can comprise administering any of the nucleic acid constructs described herein (or any of the compositions comprising a nucleic acid construct described herein, including, for example, vectors or lipid nanoparticles) to the subject (e.g., a subject without preexisting immunity to the nucleic acid construct, the polypeptide of interest encoded by the nucleic acid construct, the nuclease agent or one or more nucleic acids encoding the nuclease agent, or a delivery vehicle for the nucleic acid construct, the nuclease agent, or the one or more nucleic acids encoding the nuclease agent, such as AAV) in combination with a B cell depleting agent (e.g., anti-CD20×CD3 antigen-binding molecule). In some embodiments, a plasma cell depleting agent is not administered to the subject (e.g., a subject without preexisting immunity to the nucleic acid construct, the polypeptide of interest encoded by the nucleic acid construct, the nuclease agent or one or more nucleic acids encoding the nuclease agent, or a delivery vehicle for the nucleic acid construct, the nuclease agent, or the one or more nucleic acids encoding the nuclease agent, such as AAV) simultaneously with the B cell depleting agent. In some embodiments, an immunoglobulin depleting agent is not administered to the subject (e.g., a subject without preexisting immunity to the nucleic acid construct, the polypeptide of interest encoded by the nucleic acid construct, the nuclease agent or one or more nucleic acids encoding the nuclease agent, or a delivery vehicle for the nucleic acid construct, the nuclease agent, or the one or more nucleic acids encoding the nuclease agent, such as AAV) simultaneously with the B cell depleting agent. In some embodiments, neither a plasma cell depleting agent nor an immunoglobulin depleting agent is administered to the subject (e.g., a subject without preexisting immunity to the nucleic acid construct, the polypeptide of interest encoded by the nucleic acid construct, the nuclease agent or one or more nucleic acids encoding the nuclease agent, or a delivery vehicle for the nucleic acid construct, the nuclease agent, or the one or more nucleic acids encoding the nuclease agent, such as AAV) simultaneously with the B cell depleting agent. In some embodiments, a plasma cell depleting agent is not administered to the subject (e.g., a subject without preexisting immunity to the nucleic acid construct, the polypeptide of interest encoded by the nucleic acid construct, the nuclease agent or one or more nucleic acids encoding the nuclease agent, or a delivery vehicle for the nucleic acid construct, the nuclease agent, or the one or more nucleic acids encoding the nuclease agent, such as AAV) in combination with the B cell depleting agent. In some embodiments, an immunoglobulin depleting agent is not administered to the subject (e.g., a subject without preexisting immunity to the nucleic acid construct, the polypeptide of interest encoded by the nucleic acid construct, the nuclease agent or one or more nucleic acids encoding the nuclease agent, or a delivery vehicle for the nucleic acid construct, the nuclease agent, or the one or more nucleic acids encoding the nuclease agent, such as AAV) in combination with the B cell depleting agent. In some embodiments, neither a plasma cell depleting agent nor an immunoglobulin depleting agent is administered to the subject (e.g., a subject without preexisting immunity to the nucleic acid construct, the polypeptide of interest encoded by the nucleic acid construct, the nuclease agent or one or more nucleic acids encoding the nuclease agent, or a delivery vehicle for the nucleic acid construct, the nuclease agent, or the one or more nucleic acids encoding the nuclease agent, such as AAV) in combination with the B cell depleting agent. The B cell depleting agent can be administered prior to, simultaneously with, or after the nucleic acid construct. In one example, the B cell depleting agent is administered prior to the nucleic acid construct. In another example, the B cell depleting agent is administered prior to and after the nucleic acid construct. The nucleic acid construct can be administered together with a nuclease agent described herein, or can be administered alone. For example, the nucleic acid construct can be one that expresses the polypeptide of interest without being integrated into target genomic locus (e.g., an episomal vector or an expression vector in which the coding sequence for the polypeptide of interest is operably linked to a promoter). In some methods, the nucleic acid construct can be administered together with a nuclease agent described herein (e.g., simultaneously or sequentially in any order). The B cell depleting agent can be administered prior to, simultaneously with, or after the nuclease agent. In one example, the B cell depleting agent is administered prior to the nuclease agent. In another example, the B cell depleting agent is administered prior to and after the nuclease agent. The nuclease agent can cleave a nuclease target sequence within a target genomic locus (e.g., target gene), the nucleic acid construct can be inserted into the target genomic locus to create a modified target genomic locus, and the polypeptide of interest can be expressed from the modified target genomic locus. The coding sequence for the polypeptide of interest can be operably linked to an endogenous promoter at the target genomic locus upon integration into the target genomic locus, or it can be operably linked to an exogenous promoter present in the nucleic acid construct. In one example, the nuclease agent is a CRISPR/Cas system, and the target gene is ALB (e.g., intron 1 of ALB). In such methods, the guide RNA can bind to the Cas protein and target the Cas protein to the guide RNA target sequence in intron 1 of the ALB gene, the Cas protein can cleave the guide RNA target sequence, the nucleic acid construct can be inserted into the ALB gene to create a modified ALB gene, and the polypeptide of interest can be expressed from the modified ALB gene.

[0971] In another example, provided herein are methods of expressing a polypeptide of interest (e.g., from a target genomic locus) in a cell or a population of cells in a subject. Such methods can comprise administering any of the nucleic acid constructs described herein (or any of the compositions comprising a nucleic acid construct described herein, including, for example, vectors or lipid nanoparticles) to the subject (e.g., a subject without preexisting immunity to the nucleic acid construct, the polypeptide of interest encoded by the nucleic acid construct, the nuclease agent or one or more nucleic acids encoding the nuclease agent, or a delivery vehicle for the nucleic acid construct, the nuclease agent, or the one or more nucleic acids encoding the nuclease agent, such as AAV) in combination with a B cell depleting agent (e.g., anti-CD20×CD3 antigen-binding molecule). In some embodiments, a plasma cell depleting agent is not administered to the subject (e.g., a subject without preexisting immunity to the nucleic acid construct, the polypeptide of interest encoded by the nucleic acid construct, the nuclease agent or one or more nucleic acids encoding the nuclease agent, or a delivery vehicle for the nucleic acid construct, the nuclease agent, or the one or more nucleic acids encoding the nuclease agent, such as AAV) simultaneously with the B cell depleting agent. In some embodiments, an immunoglobulin depleting agent is not administered to the subject (e.g., a subject without preexisting immunity to the nucleic acid construct, the polypeptide of interest encoded by the nucleic acid construct, the nuclease agent or one or more nucleic acids encoding the nuclease agent, or a delivery vehicle for the nucleic acid construct, the nuclease agent, or the one or more nucleic acids encoding the nuclease agent, such as AAV) simultaneously with the B cell depleting agent. In some embodiments, neither a plasma cell depleting agent nor an immunoglobulin depleting agent is administered to the subject (e.g., a subject without preexisting immunity to the nucleic acid construct, the polypeptide of interest encoded by the nucleic acid construct, the nuclease agent or one or more nucleic acids encoding the nuclease agent, or a delivery vehicle for the nucleic acid construct, the nuclease agent, or the one or more nucleic acids encoding the nuclease agent, such as AAV) simultaneously with the B cell depleting agent. In some embodiments, a plasma cell depleting agent is not administered to the subject (e.g., a subject without preexisting immunity to the nucleic acid construct, the polypeptide of interest encoded by the nucleic acid construct, the nuclease agent or one or more nucleic acids encoding the nuclease agent, or a delivery vehicle for the nucleic acid construct, the nuclease agent, or the one or more nucleic acids encoding the nuclease agent, such as AAV) in combination with the B cell depleting agent. In some embodiments, an immunoglobulin depleting agent is not administered to the subject (e.g., a subject without preexisting immunity to the nucleic acid construct, the polypeptide of interest encoded by the nucleic acid construct, the nuclease agent or one or more nucleic acids encoding the nuclease agent, or a delivery vehicle for the nucleic acid construct, the nuclease agent, or the one or more nucleic acids encoding the nuclease agent, such as AAV) in combination with the B cell depleting agent. In some embodiments, neither a plasma cell depleting agent nor an immunoglobulin depleting agent is administered to the subject (e.g., a subject without preexisting immunity to the nucleic acid construct, the polypeptide of interest encoded by the nucleic acid construct, the nuclease agent or one or more nucleic acids encoding the nuclease agent, or a delivery vehicle for the nucleic acid construct, the nuclease agent, or the one or more nucleic acids encoding the nuclease agent, such as AAV) in combination with the B cell depleting agent. The B cell depleting agent can be administered prior to, simultaneously with, or after the nucleic acid construct. In one example, the B cell depleting agent is administered prior to the nucleic acid construct. In another example, the B cell depleting agent is administered prior to and after the nucleic acid construct. In some methods, the nucleic acid construct or composition comprising the nucleic acid construct can be administered without a nuclease agent (e.g., if the nucleic acid construct comprises elements needed for expression of the polypeptide of interest without integration into a target genomic locus). In some methods, the nucleic acid construct can be administered together with a nuclease agent described herein (e.g., simultaneously or sequentially in any order). The B cell depleting agent can be administered prior to, simultaneously with, or after the nuclease agent. In one example, the B cell depleting agent is administered prior to the nuclease agent. In another example, the B cell depleting agent is administered prior to and after the nuclease agent. The nuclease agent can cleave a nuclease target sequence within a target genomic locus (e.g., target gene), the nucleic acid construct can be inserted into the target genomic locus to create a modified target genomic locus, and the polypeptide of interest can be expressed from the modified target genomic locus. The coding sequence for the polypeptide of interest can be operably linked to an endogenous promoter at the target genomic locus upon integration into the target genomic locus, or it can be operably linked to an exogenous promoter present in the nucleic acid construct. In one example, the nuclease agent is a CRISPR/Cas system, and the target gene is ALB (e.g., intron 1 of ALB). In such methods, the guide RNA can bind to the Cas protein and target the Cas protein to the guide RNA target sequence in intron 1 of the ALB gene, the Cas protein can cleave the guide RNA target sequence, the nucleic acid construct can be inserted into the ALB gene to create a modified ALB gene, and the polypeptide of interest can be expressed from the modified ALB gene.

[0972] In another example, provided herein are methods of inserting or integrating a nucleic acid construct into a target genomic locus in a cell or a population of cells in a subject. Such methods can comprise administering any of the nucleic acid constructs described herein (or any of the compositions comprising a nucleic acid construct described herein, including, for example, vectors or lipid nanoparticles) to the subject (e.g., a subject without preexisting immunity to the nucleic acid construct, the polypeptide of interest encoded by the nucleic acid construct, the nuclease agent or one or more nucleic acids encoding the nuclease agent, or a delivery vehicle for the nucleic acid construct, the nuclease agent, or the one or more nucleic acids encoding the nuclease agent, such as AAV) in combination with a B cell depleting agent (e.g., anti-CD20×CD3 antigen-binding molecule). In some embodiments, a plasma cell depleting agent is not administered to the subject (e.g., a subject without preexisting immunity to the nucleic acid construct, the polypeptide of interest encoded by the nucleic acid construct, the nuclease agent or one or more nucleic acids encoding the nuclease agent, or a delivery vehicle for the nucleic acid construct, the nuclease agent, or the one or more nucleic acids encoding the nuclease agent, such as AAV) simultaneously with the B cell depleting agent. In some embodiments, an immunoglobulin depleting agent is not administered to the subject (e.g., a subject without preexisting immunity to the nucleic acid construct, the polypeptide of interest encoded by the nucleic acid construct, the nuclease agent or one or more nucleic acids encoding the nuclease agent, or a delivery vehicle for the nucleic acid construct, the nuclease agent, or the one or more nucleic acids encoding the nuclease agent, such as AAV) simultaneously with the B cell depleting agent. In some embodiments, neither a plasma cell depleting agent nor an immunoglobulin depleting agent is administered to the subject (e.g., a subject without preexisting immunity to the nucleic acid construct, the polypeptide of interest encoded by the nucleic acid construct, the nuclease agent or one or more nucleic acids encoding the nuclease agent, or a delivery vehicle for the nucleic acid construct, the nuclease agent, or the one or more nucleic acids encoding the nuclease agent, such as AAV) simultaneously with the B cell depleting agent. In some embodiments, a plasma cell depleting agent is not administered to the subject (e.g., a subject without preexisting immunity to the nucleic acid construct, the polypeptide of interest encoded by the nucleic acid construct, the nuclease agent or one or more nucleic acids encoding the nuclease agent, or a delivery vehicle for the nucleic acid construct, the nuclease agent, or the one or more nucleic acids encoding the nuclease agent, such as AAV) in combination with the B cell depleting agent. In some embodiments, an immunoglobulin depleting agent is not administered to the subject (e.g., a subject without preexisting immunity to the nucleic acid construct, the polypeptide of interest encoded by the nucleic acid construct, the nuclease agent or one or more nucleic acids encoding the nuclease agent, or a delivery vehicle for the nucleic acid construct, the nuclease agent, or the one or more nucleic acids encoding the nuclease agent, such as AAV) in combination with the B cell depleting agent. In some embodiments, neither a plasma cell depleting agent nor an immunoglobulin depleting agent is administered to the subject (e.g., a subject without preexisting immunity to the nucleic acid construct, the polypeptide of interest encoded by the nucleic acid construct, the nuclease agent or one or more nucleic acids encoding the nuclease agent, or a delivery vehicle for the nucleic acid construct, the nuclease agent, or the one or more nucleic acids encoding the nuclease agent, such as AAV) in combination with the B cell depleting agent. The B cell depleting agent can be administered prior to, simultaneously with, or after the nucleic acid construct. In one example, the B cell depleting agent is administered prior to the nucleic acid construct. In another example, the B cell depleting agent is administered prior to and after the nucleic acid construct. In some methods, the nucleic acid construct or composition comprising the nucleic acid construct can be administered together with a nuclease agent described herein (e.g., simultaneously or sequentially in any order). The B cell depleting agent can be administered prior to, simultaneously with, or after the nuclease agent. In one example, the B cell depleting agent is administered prior to the nuclease agent. In another example, the B cell depleting agent is administered prior to and after the nuclease agent. The nuclease agent can cleave a nuclease target sequence within a target genomic locus (e.g., target gene), the nucleic acid construct can be inserted into the target genomic locus to create a modified target genomic locus, and the polypeptide of interest can be expressed from the modified target genomic locus. The coding sequence for the polypeptide of interest can be operably linked to an endogenous promoter at the target genomic locus upon integration into the target genomic locus, or it can be operably linked to an exogenous promoter present in the nucleic acid construct. In one example, the nuclease agent is a CRISPR/Cas system, and the target gene is ALB (e.g., intron 1 of ALB). In such methods, the guide RNA can bind to the Cas protein and target the Cas protein to the guide RNA target sequence in intron 1 of the ALB gene, the Cas protein can cleave the guide RNA target sequence, the nucleic acid construct can be inserted into the ALB gene to create a modified ALB gene, and the polypeptide of interest can be expressed from the modified ALB gene.

[0973] Also provided are methods of treating an enzyme deficiency in a subject in need thereof. Such methods can comprise administering any of the nucleic acid constructs described herein (or any of the compositions comprising a nucleic acid construct described herein, including, for example, vectors or lipid nanoparticles) to the subject (e.g., a subject without preexisting immunity to the nucleic acid construct, the polypeptide of interest encoded by the nucleic acid construct, the nuclease agent or one or more nucleic acids encoding the nuclease agent, or a delivery vehicle for the nucleic acid construct, the nuclease agent, or the one or more nucleic acids encoding the nuclease agent, such as AAV) in combination with a B cell depleting agent (e.g., anti-CD20×CD3 antigen-binding molecule) such that a therapeutically effective level of polypeptide of interest expression or a therapeutically effective level of circulating polypeptide of interest is achieved in the subject. In some embodiments, a plasma cell depleting agent is not administered to the subject (e.g., a subject without preexisting immunity to the nucleic acid construct, the polypeptide of interest encoded by the nucleic acid construct, the nuclease agent or one or more nucleic acids encoding the nuclease agent, or a delivery vehicle for the nucleic acid construct, the nuclease agent, or the one or more nucleic acids encoding the nuclease agent, such as AAV) simultaneously with the B cell depleting agent. In some embodiments, an immunoglobulin depleting agent is not administered to the subject (e.g., a subject without preexisting immunity to the nucleic acid construct, the polypeptide of interest encoded by the nucleic acid construct, the nuclease agent or one or more nucleic acids encoding the nuclease agent, or a delivery vehicle for the nucleic acid construct, the nuclease agent, or the one or more nucleic acids encoding the nuclease agent, such as AAV) simultaneously with the B cell depleting agent. In some embodiments, neither a plasma cell depleting agent nor an immunoglobulin depleting agent is administered to the subject (e.g., a subject without preexisting immunity to the nucleic acid construct, the polypeptide of interest encoded by the nucleic acid construct, the nuclease agent or one or more nucleic acids encoding the nuclease agent, or a delivery vehicle for the nucleic acid construct, the nuclease agent, or the one or more nucleic acids encoding the nuclease agent, such as, e.g., AAV) simultaneously with the B cell depleting agent. In some embodiments, a plasma cell depleting agent is not administered to the subject (e.g., a subject without preexisting immunity to the nucleic acid construct, the polypeptide of interest encoded by the nucleic acid construct, the nuclease agent or one or more nucleic acids encoding the nuclease agent, or a delivery vehicle for the nucleic acid construct, the nuclease agent, or the one or more nucleic acids encoding the nuclease agent, such as AAV) in combination with the B cell depleting agent. In some embodiments, an immunoglobulin depleting agent is not administered to the subject (e.g., a subject without preexisting immunity to the nucleic acid construct, the polypeptide of interest encoded by the nucleic acid construct, the nuclease agent or one or more nucleic acids encoding the nuclease agent, or a delivery vehicle for the nucleic acid construct, the nuclease agent, or the one or more nucleic acids encoding the nuclease agent, such as AAV) in combination with the B cell depleting agent. In some embodiments, neither a plasma cell depleting agent nor an immunoglobulin depleting agent is administered to the subject (e.g., a subject without preexisting immunity to the nucleic acid construct, the polypeptide of interest encoded by the nucleic acid construct, the nuclease agent or one or more nucleic acids encoding the nuclease agent, or a delivery vehicle for the nucleic acid construct, the nuclease agent, or the one or more nucleic acids encoding the nuclease agent, such as AAV) in combination with the B cell depleting agent. The B cell depleting agent can be administered prior to, simultaneously with, or after the nucleic acid construct. In one example, the B cell depleting agent is administered prior to the nucleic acid construct. In another example, the B cell depleting agent is administered prior to and after the nucleic acid construct. In some methods, the nucleic acid construct or composition comprising the nucleic acid construct can be administered without a nuclease agent (e.g., if the nucleic acid construct comprises elements needed for expression of polypeptide of interest without integration into a target genomic locus). In some methods, the nucleic acid construct can be administered together with a nuclease agent described herein (e.g., simultaneously or sequentially in any order). The B cell depleting agent can be administered prior to, simultaneously with, or after the nuclease agent. In one example, the B cell depleting agent is administered prior to the nuclease agent. In another example, the B cell depleting agent is administered prior to and after the nuclease agent. The nuclease agent can cleave a nuclease target sequence within a target genomic locus (e.g., target gene), the nucleic acid construct can be inserted into the target genomic locus to create a modified target genomic locus, and the polypeptide of interest can be expressed from the modified target genomic locus (e.g., such that a therapeutically effective level of polypeptide of interest expression or a therapeutically effective level of circulating polypeptide of interest is achieved in the subject). The coding sequence for the polypeptide of interest can be operably linked to an endogenous promoter at the target genomic locus upon integration into the target genomic locus, or it can be operably linked to an exogenous promoter present in the nucleic acid construct. In one example, the nuclease agent is a CRISPR/Cas system, and the target gene is ALB (e.g., intron 1 of ALB). In such methods, the guide RNA can bind to the Cas protein and target the Cas protein to the guide RNA target sequence in intron 1 of the ALB gene, the Cas protein can cleave the guide RNA target, the nucleic acid construct can be inserted into the ALB gene to create a modified ALB gene, and the polypeptide of interest can be expressed from the modified ALB gene (e.g., such that a therapeutically effective level of polypeptide of interest expression or a therapeutically effective level of circulating polypeptide of interest is achieved in the subject). In one example, the subject has a disease of a bleeding disorder characterized by the enzyme deficiency, a disease of an inborn error of metabolism characterized by the enzyme deficiency, or a lysosomal storage disease characterized by the enzyme deficiency. In one example, the disease is hemophilia B and the polypeptide of interest is a factor IX protein. In another example, the disease is hemophilia A and the polypeptide of interest is a factor VIII protein. In another example, the disease is Pompe disease and the polypeptide of interest is a multidomain therapeutic protein comprising a delivery domain fused to a lysosomal alpha-glucosidase.

[0974] Treatment refers to any administration or application of a therapeutic for disease or disorder in a subject, and includes inhibiting the disease, arresting its development, relieving one or more symptoms of the disease, curing the disease, or preventing reoccurrence of one or more symptoms of the disease.

[0975] Also provided are methods of preventing or reducing the onset of a sign or symptom of an enzyme deficiency in a subject (e.g., as compared to an untreated, control subject). By preventing is meant the sign or symptom of the enzyme deficiency never becomes present. Such methods can comprise administering any of the nucleic acid constructs described herein (or any of the compositions comprising a nucleic acid construct described herein, including, for example, vectors or lipid nanoparticles) to the subject (e.g., a subject without preexisting immunity to the nucleic acid construct, the polypeptide of interest encoded by the nucleic acid construct, the nuclease agent or one or more nucleic acids encoding the nuclease agent, or a delivery vehicle for the nucleic acid construct, the nuclease agent, or the one or more nucleic acids encoding the nuclease agent, such as AAV) in combination with a B cell depleting agent (e.g., anti-CD20×CD3 antigen-binding molecule) such that a therapeutically effective level of polypeptide of interest expression or a therapeutically effective level of circulating polypeptide of interest is achieved in the subject. In some embodiments, a plasma cell depleting agent is not administered to the subject (e.g., a subject without preexisting immunity to the nucleic acid construct, the polypeptide of interest encoded by the nucleic acid construct, the nuclease agent or one or more nucleic acids encoding the nuclease agent, or a delivery vehicle for the nucleic acid construct, the nuclease agent, or the one or more nucleic acids encoding the nuclease agent, such as AAV) simultaneously with the B cell depleting agent. In some embodiments, an immunoglobulin depleting agent is not administered to the subject (e.g., a subject without preexisting immunity to the nucleic acid construct, the polypeptide of interest encoded by the nucleic acid construct, the nuclease agent or one or more nucleic acids encoding the nuclease agent, or a delivery vehicle for the nucleic acid construct, the nuclease agent, or the one or more nucleic acids encoding the nuclease agent, such as AAV) simultaneously with the B cell depleting agent. In some embodiments, neither a plasma cell depleting agent nor an immunoglobulin depleting agent is administered to the subject (e.g., a subject without preexisting immunity to the nucleic acid construct, the polypeptide of interest encoded by the nucleic acid construct, the nuclease agent or one or more nucleic acids encoding the nuclease agent, or a delivery vehicle for the nucleic acid construct, the nuclease agent, or the one or more nucleic acids encoding the nuclease agent, such as AAV) simultaneously with the B cell depleting agent. In some embodiments, a plasma cell depleting agent is not administered to the subject (e.g., a subject without preexisting immunity to the nucleic acid construct, the polypeptide of interest encoded by the nucleic acid construct, the nuclease agent or one or more nucleic acids encoding the nuclease agent, or a delivery vehicle for the nucleic acid construct, the nuclease agent, or the one or more nucleic acids encoding the nuclease agent, such as AAV) in combination with the B cell depleting agent. In some embodiments, an immunoglobulin depleting agent is not administered to the subject (e.g., a subject without preexisting immunity to the nucleic acid construct, the polypeptide of interest encoded by the nucleic acid construct, the nuclease agent or one or more nucleic acids encoding the nuclease agent, or a delivery vehicle for the nucleic acid construct, the nuclease agent, or the one or more nucleic acids encoding the nuclease agent, such as AAV) in combination with the B cell depleting agent. In some embodiments, neither a plasma cell depleting agent nor an immunoglobulin depleting agent is administered to the subject (e.g., a subject without preexisting immunity to the nucleic acid construct, the polypeptide of interest encoded by the nucleic acid construct, the nuclease agent or one or more nucleic acids encoding the nuclease agent, or a delivery vehicle for the nucleic acid construct, the nuclease agent, or the one or more nucleic acids encoding the nuclease agent, such as AAV) in combination with the B cell depleting agent. The B cell depleting agent can be administered prior to, simultaneously with, or after the nucleic acid construct. In one example, the B cell depleting agent is administered prior to the nucleic acid construct. In another example, the B cell depleting agent is administered prior to and after the nucleic acid construct. In some methods, the nucleic acid construct or composition comprising the nucleic acid construct can be administered without a nuclease agent (e.g., if the nucleic acid construct comprises elements needed for expression of the polypeptide of interest without integration into a target genomic locus). In some methods, the nucleic acid construct can be administered together with a nuclease agent described herein (e.g., simultaneously or sequentially in any order). The B cell depleting agent can be administered prior to, simultaneously with, or after the nuclease agent. In one example, the B cell depleting agent is administered prior to the nuclease agent. In another example, the B cell depleting agent is administered prior to and after the nuclease agent. The nuclease agent can cleave a nuclease target sequence within a target genomic locus (e.g., target gene), the nucleic acid construct can be inserted into the target genomic locus to create a modified target genomic locus, and the polypeptide of interest can be expressed from the modified target genomic locus (e.g., such that a therapeutically effective level of polypeptide of interest expression or a therapeutically effective level of circulating polypeptide of interest is achieved in the subject). The coding sequence for the polypeptide of interest can be operably linked to an endogenous promoter at the target genomic locus upon integration into the target genomic locus, or it can be operably linked to an exogenous promoter present in the nucleic acid construct. In one example, the nuclease agent is a CRISPR/Cas system, and the target gene is ALB (e.g., intron 1 of ALB). In such methods, the guide RNA can bind to the Cas protein and target the Cas protein to the guide RNA target sequence in intron 1 of the ALB gene, the Cas protein can cleave the guide RNA target, the nucleic acid construct can be inserted into the ALB gene to create a modified ALB gene, and the polypeptide of interest can be expressed from the modified ALB gene (e.g., such that a therapeutically effective level of polypeptide of interest expression or a therapeutically effective level of circulating polypeptide of interest is achieved in the subject). In one example, the subject has a disease of a bleeding disorder characterized by the enzyme deficiency, a disease of an inborn error of metabolism characterized by the enzyme deficiency, or a lysosomal storage disease characterized by the enzyme deficiency. In one example, the disease is hemophilia B and the polypeptide of interest is a factor IX protein. In another example, the disease is hemophilia A and the polypeptide of interest is a factor VIII protein. In another example, the disease is Pompe disease and the polypeptide of interest is a multidomain therapeutic protein comprising a delivery domain fused to a lysosomal alpha-glucosidase.

[0976] Any of the above methods can further comprise one or more subsequent administration steps. The subsequent administration step can comprise, for example, administering the nucleic acid construct to the subject one or more subsequent times until a desired level of expression and/or activity of the polypeptide of interest is achieved in the subject. In one example, the subsequent administration step can comprise administering to the subject one or more subsequent times: (a) the nucleic acid construct; (b) the nuclease agent or the one or more nucleic acids encoding the nuclease agent; and optionally (c) the B cell depleting agent. In another example, the subsequent administration step can comprise administering to the subject one or more subsequent times: (a) the nucleic acid construct; (b) a second nuclease agent or one or more nucleic acids encoding the second nuclease agent, wherein the second nuclease agent targets a second nuclease target site in the target genomic locus, wherein the second nuclease target site is different from the first nuclease target site; and optionally (c) the B cell depleting agent. In one example, the first nuclease target site can be a first location in ALB, and the second nuclease target site can be a second location in ALB. For example, the first nuclease target site can be a first location in intron 1 of ALB, and the second nuclease target site can be a second location in intron 1 of ALB. In a specific example, the first nuclease agent targets SEQ ID NO: 255 (e.g., G009860). For example, the first nuclease agent can target SEQ ID NO: 255 (e.g., G009860), and the second nuclease agent can target SEQ ID NO: 249 (e.g., G009844) (or vice versa). For example, the first nuclease agent can target SEQ ID NO: 255 (e.g., G009860), and the second nuclease agent can target SEQ ID NO: 252 (e.g., G009857) (or vice versa). For example, the first nuclease agent can target SEQ ID NO: 255 (e.g., G009860), and the second nuclease agent can target SEQ ID NO: 260 (e.g., G009874) (or vice versa). In another example, the subsequent administration step can comprise administering to the subject one or more subsequent times: (a) the nucleic acid construct; (b) a second nuclease agent or one or more nucleic acids encoding the second nuclease agent, wherein the second nuclease agent targets a second nuclease target site in a second target genomic locus that is different from the first target genomic locus (e.g., ALB is the first target genomic locus, and the second target genomic locus is different (e.g., TTR)); and optionally (c) the B cell depleting agent. In one example, the first target genomic locus can be ALB (e.g., intron 1 of ALB). For example, the first target genomic locus can be ALB (e.g., intron 1 of ALB), and the second target genomic locus can be TTR (e.g., intron 1 of TTR). The subsequent administration step can be, for example, at least about 1 week, at least about 2 weeks, at least about 3 weeks, at least about 4 weeks, at least about 5 weeks, at least about 6 weeks, at least about 7 weeks, at least about 8 weeks, at least about 9 weeks, at least about 10 weeks, at least about 11 weeks, or at least about 12 weeks after the initial dosing (e.g., at least about 4 weeks after the initial dosing) or about 4 weeks to about 12 weeks, about 4 weeks to about 13 weeks, about 4 weeks to about 14 weeks, about 4 weeks to about 15 weeks, about 4 weeks to about 16 weeks, about 1 week to about 12 weeks, about 2 weeks to about 12 weeks, about 3 weeks to about 12 weeks, about 1 week to about 15 weeks, about 2 week to about 14 weeks, or about 3 weeks to about 13 weeks after the initial dosing (e.g., about 4 weeks to about 12 weeks after the initial dosing). Such methods can further comprise the following steps prior to the subsequent administration step: (i) measuring expression and/or activity of the polypeptide of interest in the subject; and (ii) determining the dose of the nucleic acid construct and the nuclease agent or the one or more nucleic acids encoding the nuclease agent for the subsequent administration step in order to achieve the desired level of expression and/or activity of the polypeptide of interest in the subject. The measuring can be, for example, at least 1 week, at least 2 weeks, at least 3 weeks, or at least 4 weeks after dosing (e.g., at least 4 weeks after dosing) or can be from about 1 week to about 7 weeks, about 2 weeks to about 6 weeks, about 3 weeks to about 5 weeks, about 4 weeks, about 1 week to about 4 weeks, about 2 weeks to about 4 weeks, about 3 weeks to about 4 weeks, about 4 weeks to about 5 weeks, about 4 weeks to about 6 weeks, or about 4 weeks to about 7 weeks after dosing. In one specific example, the polypeptide of interest is a factor IX protein, and the desired expression level of the factor IX protein in the subject is a serum level of at least about 0.5 μg/mL, at least about 1 μg/mL, at least about 1.5 μg/mL, at least about 2 μg/mL, at least about 2.5 μg/mL, at least about 3 μg/mL, at least about 3.5 μg/mL, at least about 4 μg/mL, at least about 4.5 μg/mL, or at least about 5 μg/mL or about 1 to about 5, about 2 to about 5, or about 3 to about 5 μg/mL (e.g., a serum level of at least about 3 μg/mL or about 3 to about 5 μg/mL). In another specific example, the polypeptide of interest is a multidomain therapeutic protein comprising a delivery domain fused to a lysosomal alpha-glucosidase, and the desired expression level of the multidomain therapeutic protein in the subject is a serum level of at least about 0.5 μg/mL, at least about 1 μg/mL, at least about 1.5 μg/mL, at least about 2 μg/mL, at least about 2.5 μg/mL, at least about 3 μg/mL, at least about 3.5 μg/mL, at least about 4 μg/mL, at least about 4.5 μg/mL, or at least about 5 μg/mL (e.g., a serum level of at least about 2 μg/mL or at least about 5 μg/mL or about 2 to about 50 μg/mL).

[0977] Alternatively, the subsequent administration step can comprise, for example, administering a second nucleic acid construct comprising a second coding sequence for the polypeptide of interest (e.g., wherein the second coding sequence is different from the first coding sequence) to the subject one or more subsequent times until a desired level of expression and/or activity of the polypeptide of interest is achieved in the subject. In one example, the subsequent administration step can comprise administering to the subject one or more subsequent times: (a) a second nucleic acid construct comprising a second coding sequence for the polypeptide of interest, wherein the second coding sequence is different from the first coding sequence; (b) (i) the first nuclease agent or the one or more nucleic acids encoding the first nuclease agent; (ii) a second nuclease agent or one or more nucleic acids encoding the second nuclease agent, wherein the second nuclease agent targets a second nuclease target site in the target genomic locus, wherein the second nuclease target site is different from the first nuclease target site; or (iii) a second nuclease agent or one or more nucleic acids encoding the second nuclease agent, wherein the second nuclease agent targets a second nuclease target site in a second target genomic locus that is different from the first target genomic locus (e.g., ALB is the first target genomic locus, and the second target genomic locus is different (e.g., TTR)); and optionally (c) the B cell depleting agent. In one example, the first nuclease target site can be a first location in ALB, and the second nuclease target site can be a second location in ALB. For example, the first nuclease target site can be a first location in intron 1 of ALB, and the second nuclease target site can be a second location in intron 1 of ALB. In a specific example, the first nuclease agent targets SEQ ID NO: 255 (e.g., G009860). For example, the first nuclease agent can target SEQ ID NO: 255 (e.g., G009860), and the second nuclease agent can target SEQ ID NO: 249 (e.g., G009844) (or vice versa). For example, the first nuclease agent can target SEQ ID NO: 255 (e.g., G009860), and the second nuclease agent can target SEQ ID NO: 252 (e.g., G009857) (or vice versa). For example, the first nuclease agent can target SEQ ID NO: 255 (e.g., G009860), and the second nuclease agent can target SEQ ID NO: 260 (e.g., G009874) (or vice versa). In one example, the first target genomic locus can be ALB (e.g., intron 1 of ALB). For example, the first target genomic locus can be ALB (e.g., intron 1 of ALB), and the second target genomic locus can be TTR (e.g., intron 1 of TTR). The subsequent administration step can be, for example, at least about 1 week, at least about 2 weeks, at least about 3 weeks, at least about 4 weeks, at least about 5 weeks, at least about 6 weeks, at least about 7 weeks, at least about 8 weeks, at least about 9 weeks, at least about 10 weeks, at least about 11 weeks, or at least about 12 weeks after the initial dosing (e.g., at least about 4 weeks after the initial dosing) or about 4 weeks to about 12 weeks, about 4 weeks to about 13 weeks, about 4 weeks to about 14 weeks, about 4 weeks to about 15 weeks, about 4 weeks to about 16 weeks, about 1 week to about 12 weeks, about 2 weeks to about 12 weeks, about 3 weeks to about 12 weeks, about 1 week to about 15 weeks, about 2 week to about 14 weeks, or about 3 weeks to about 13 weeks after the initial dosing (e.g., about 4 weeks to about 12 weeks after the initial dosing). Such methods can further comprise the following steps prior to the subsequent administration step: (i) measuring expression and/or activity of the polypeptide of interest in the subject; and (ii) determining the dose of the nucleic acid construct and the nuclease agent or the one or more nucleic acids encoding the nuclease agent for the subsequent administration step in order to achieve the desired level of expression and/or activity of the polypeptide of interest in the subject. The measuring can be, for example, at least 1 week, at least 2 weeks, at least 3 weeks, or at least 4 weeks after dosing (e.g., at least 4 weeks after dosing) or can be from about 1 week to about 7 weeks, about 2 weeks to about 6 weeks, about 3 weeks to about 5 weeks, about 4 weeks, about 1 week to about 4 weeks, about 2 weeks to about 4 weeks, about 3 weeks to about 4 weeks, about 4 weeks to about 5 weeks, about 4 weeks to about 6 weeks, or about 4 weeks to about 7 weeks after dosing. In one specific example, the polypeptide of interest is a factor IX protein, and the desired expression level of the factor IX protein in the subject is a serum level of at least about 0.5 μg/mL, at least about 1 μg/mL, at least about 1.5 μg/mL, at least about 2 μg/mL, at least about 2.5 μg/mL, at least about 3 μg/mL, at least about 3.5 μg/mL, at least about 4 μg/mL, at least about 4.5 μg/mL, or at least about 5 μg/mL or about 1 to about 5, about 2 to about 5, or about 3 to about 5 μg/mL (e.g., a serum level of at least about 3 μg/mL or at least about 5 μg/mL or about 3-5 μg/mL). In another specific example, the polypeptide of interest is a multidomain therapeutic protein comprising a delivery domain fused to a lysosomal alpha-glucosidase, and the desired expression level of the multidomain therapeutic protein in the subject is a serum level of at least about 0.5 μg/mL, at least about 1 μg/mL, at least about 1.5 μg/mL, at least about 2 μg/mL, at least about 2.5 μg/mL, at least about 3 μg/mL, at least about 3.5 μg/mL, at least about 4 μg/mL, at least about 4.5 μg/mL, or at least about 5 μg/mL (e.g., a serum level of at least about 2 μg/mL or at least about 5 μg/mL).

[0978] Alternatively, the subsequent administration step can comprise, for example, administering a second nucleic acid construct comprising a coding sequence for a second polypeptide of interest (e.g., that is different from the first polypeptide of interest) to the subject one or more subsequent times until a desired level of expression and/or activity of the polypeptide of interest is achieved in the subject. In one example, the subsequent administration step can comprise administering to the subject one or more subsequent times: (a) a second nucleic acid construct comprising a coding sequence for a second polypeptide of interest that is different from the first polypeptide of interest; (b) (i) the first nuclease agent or the one or more nucleic acids encoding the first nuclease agent; (ii) a second nuclease agent or one or more nucleic acids encoding the second nuclease agent, wherein the second nuclease agent targets a second nuclease target site in the target genomic locus, wherein the second nuclease target site is different from the first nuclease target site; or (iii) a second nuclease agent or one or more nucleic acids encoding the second nuclease agent, wherein the second nuclease agent targets a second nuclease target site in a second target genomic locus that is different from the first target genomic locus (e.g., ALB is the first target genomic locus, and the second target genomic locus is different (e.g., TTR)); and optionally (c) the B cell depleting agent. In one example, the first nuclease target site can be a first location in ALB, and the second nuclease target site can be a second location in ALB. For example, the first nuclease target site can be a first location in intron 1 of ALB, and the second nuclease target site can be a second location in intron 1 of ALB. In a specific example, the first nuclease agent targets SEQ ID NO: 255 (e.g., G009860). For example, the first nuclease agent can target SEQ ID NO: 255 (e.g., G009860), and the second nuclease agent can target SEQ ID NO: 249 (e.g., G009844) (or vice versa). For example, the first nuclease agent can target SEQ ID NO: 255 (e.g., G009860), and the second nuclease agent can target SEQ ID NO: 252 (e.g., G009857) (or vice versa). For example, the first nuclease agent can target SEQ ID NO: 255 (e.g., G009860), and the second nuclease agent can target SEQ ID NO: 260 (e.g., G009874) (or vice versa). In one example, the first target genomic locus can be ALB (e.g., intron 1 of ALB). For example, the first target genomic locus can be ALB (e.g., intron 1 of ALB), and the second target genomic locus can be TTR (e.g., intron 1 of TTR). The subsequent administration step can be, for example, at least about 1 week, at least about 2 weeks, at least about 3 weeks, at least about 4 weeks, at least about 5 weeks, at least about 6 weeks, at least about 7 weeks, at least about 8 weeks, at least about 9 weeks, at least about 10 weeks, at least about 11 weeks, or at least about 12 weeks after the initial dosing (e.g., at least about 4 weeks after the initial dosing) or about 4 weeks to about 12 weeks, about 4 weeks to about 13 weeks, about 4 weeks to about 14 weeks, about 4 weeks to about 15 weeks, about 4 weeks to about 16 weeks, about 1 week to about 12 weeks, about 2 weeks to about 12 weeks, about 3 weeks to about 12 weeks, about 1 week to about 15 weeks, about 2 week to about 14 weeks, or about 3 weeks to about 13 weeks after the initial dosing (e.g., about 4 weeks to about 12 weeks after the initial dosing).

[0979] In some methods, the one or more subsequent administration steps is one subsequent administration step. In some methods, the one or more subsequent administration steps is two subsequent administration steps or comprises at least two subsequent administration steps. In some methods, the one or more subsequent administration steps is three subsequent administration steps or comprises at least three subsequent administration steps. In some methods, the one or more subsequent administration steps is four subsequent administration steps or comprises at least four subsequent administration steps.

[0980] In some methods, the B cell depleting agent is administered in the one or more subsequent administration steps if there is no B cell depleting agent in the subject. In some methods, the B cell depleting agent is administered in the one or more subsequent administration steps if preexisting expression and/or activity levels of B cell depleting agent are below a desired threshold level (i.e., the level necessary to achieve the desired effect). In some methods, the method comprises measuring expression and/or activity levels of the B cell depleting agent prior to the one or more subsequent administration steps.

[0981] In some methods, a therapeutically effective amount of the nucleic acid construct or the composition comprising the nucleic acid construct or the combination of the nucleic acid construct and the B cell depleting agent and the nuclease agent (e.g., CRISPR/Cas system) is administered to the subject. A therapeutically effective amount is an amount that produces the desired effect for which it is administered. The exact amount will depend on the purpose of the treatment, and will be ascertainable by one skilled in the art using known techniques. See, e.g., Lloyd (1999) The Art, Science and Technology of Pharmaceutical Compounding. Use multiple administration steps can, in some methods, enable use of lower doses of nucleic acid construct and/or nuclease agent for administration to the subject as compared to methods in which only a single administration step is used. For example, if 2-3 administration steps are used, the dose of nucleic acid construct and/or nuclease agent can, in some methods, be 2-3× lower than the dose used in methods in which only a single administration step is used.

[0982] Therapeutic or pharmaceutical compositions comprising the compositions disclosed herein can be administered with suitable carriers, excipients, and other agents that are incorporated into formulations to provide improved transfer, delivery, tolerance, and the like. A multitude of appropriate formulations can be found in the formulary known to all pharmaceutical chemists: Remington's Pharmaceutical Sciences, Mack Publishing Company, Easton, PA. See also Powell et al. “Compendium of excipients for parenteral formulations” PDA (1998) J. Pharm. Sci. Technol. 52:238-311. In certain embodiments, the pharmaceutical compositions are non-pyrogenic.

[0983] In methods in which a nucleic acid construct is genomically integrated, any target genomic locus capable of expressing a gene can be used, such as a safe harbor locus (safe harbor gene) or an endogenous locus that would normally encode the polypeptide of interest (e.g., a F9 locus for Factor IX). Such loci are described in more detail elsewhere herein. In a specific example, the target genomic locus can be an endogenous ALB locus, such as an endogenous human ALB locus. For example, the nucleic acid construct can be genomically integrated in intron 1 of the endogenous ALB locus. Endogenous ALB exon 1 can then splice into the coding sequence for the multidomain therapeutic protein in the nucleic acid construct.

[0984] Targeted insertion of the nucleic acid construct comprising the coding sequence for the polypeptide of interest into a target genomic locus, and particularly an endogenous ALB locus, offers multiple advantages. Such methods result in stable modification to allow for stable, long-term expression of the coding sequence for the polypeptide of interest. With respect to the ALB locus, such methods are able to utilize the endogenous ALB promoter and regulatory regions to achieve therapeutically effective levels of expression. For example, the coding sequence for the polypeptide of interest in the nucleic acid construct can comprise a promoterless gene, and the inserted nucleic acid construct can be operably linked to an endogenous promoter in the target genomic locus (e.g., ALB locus). Use of an endogenous promoter is advantageous because it obviates the need for inclusion of a promoter in the nucleic acid construct, allowing packaging of larger transgenes that may not normally package efficiently (e.g., in AAV). Alternatively, the coding sequence for the polypeptide of interest in the nucleic acid construct can be operably linked to an exogenous promoter in the nucleic acid construct. Examples of types of promoters that can be used are disclosed elsewhere herein.

[0985] Optionally, some or all of the endogenous gene (e.g., endogenous ALB gene) at the target genomic locus can be expressed upon insertion of the multidomain therapeutic protein coding sequence from the nucleic acid construct. Alternatively, in some methods, none of the endogenous gene at the target genomic locus is expressed. As one example, the modified target genomic locus (e.g., modified ALB locus) after integration of the nucleic acid construct can encode a chimeric protein comprising an endogenous secretion signal (e.g., albumin secretion signal) and the polypeptide of interest encoded by the nucleic acid construct. In another example, the first intron of an ALB locus can be targeted. The secretion signal peptide of ALB is encoded by exon 1 of the ALB gene. In such a scenario, a promoterless cassette bearing a splice acceptor and the coding sequence for the polypeptide of interest will support expression and secretion of the polypeptide of interest. Splicing between endogenous ALB exon 1 and the integrated coding sequence for the polypeptide of interest creates a chimeric mRNA and protein including the endogenous ALB sequence encoded by exon 1 operably linked to the coding sequence for the polypeptide of interest encoded by the integrated nucleic acid construct.

[0986] The nucleic acid construct can be inserted into the target genomic locus by any means, including homologous recombination (HR) and non-homologous end joining (NHEJ) as described elsewhere herein. In a specific example, the nucleic acid construct is inserted by NHEJ (e.g., does not comprise a homology arm and is inserted by NHEJ).

[0987] In another specific example, the nucleic acid construct can be inserted via homology-independent targeted integration (e.g., directional homology-independent targeted integration). For example, the coding sequence for the polypeptide of interest in the nucleic acid construct can be flanked on each side by a target site for a nuclease agent (e.g., the same target site as in the target genomic locus, and the same nuclease agent being used to cleave the target site in the target genomic locus). The nuclease agent can then cleave the target sites flanking the coding sequence for the polypeptide of interest. In a specific example, the nucleic acid construct is delivered AAV-mediated delivery, and cleavage of the target sites flanking the coding sequence for the polypeptide of interest can remove the inverted terminal repeats (ITRs) of the AAV. Removal of the ITRs can make it easier to assess successful targeting, because presence of the ITRs can hamper sequencing efforts due to the repeated sequences. In some methods, the target site in the target genomic locus (e.g., a gRNA target sequence including the flanking protospacer adjacent motif) is no longer present if the coding sequence for the polypeptide of interest is inserted into the target genomic locus in the correct orientation but it is reformed if the coding sequence for the polypeptide of interest is inserted into the target genomic locus in the opposite orientation. This can help ensure that the coding sequence for the is inserted in the correct orientation for expression.

[0988] In any of the above methods, the B cell depleting agent can be administered simultaneously with the nucleic acid construct and/or nuclease agent (e.g., CRISPR/Cas system) or not simultaneously (e.g., sequentially in any combination). For example, in a method comprising administering a composition or combination comprising a B cell depleting agent, a nucleic acid construct, and a nuclease agent, they can be administered separately (e.g., the B cell depleting agent separately from the nucleic acid construct and/or nuclease agent). For example, the B cell depleting agent can be administered prior to the nucleic acid construct and/or nuclease agent, subsequent to the nucleic acid construct and/or nuclease agent, prior to and subsequent to the nucleic acid construct and/or nuclease agent, or at the same time as the nucleic acid construct and/or nuclease agent. Any suitable methods of administering B cell depleting agents, nucleic acid constructs, and nuclease agents to cells can be used (particularly methods of administering to the liver for the nucleic acid constructs and nuclease agents), and examples of such methods are described in more detail elsewhere herein.

[0989] In methods in which a composition or combination comprising a B cell depleting agent, a nucleic acid construct (or vector or LNP), and a nuclease agent is administered (i.e., in methods in which a B cell depleting agent, a nucleic acid construct (or vector or LNP), and a nuclease agent are both administered), the B cell depleting agent, the nucleic acid construct, and the nuclease agent can be administered simultaneously. Alternatively, the B cell depleting agent and the nucleic acid construct and the nuclease agent can be administered sequentially in any order. For example, the B cell depleting agent can be administered prior to and/or after the nucleic acid construct and/or nuclease agent. In one example, the B cell depleting agent can be administered prior to and after the nucleic acid construct and/or nuclease agent. In another example, the B cell depleting agent can be administered simultaneously with and after the nucleic acid construct and/or nuclease agent.

[0990] In one example, the B cell depleting agent can be administered about 1 hour to about 48 hours, about 1 hour to about 24 hours, about 1 hour to about 12 hours, about 1 hour to about 6 hours, about 1 hour to about 2 hours, about 2 hours to about 48 hours, about 2 hours to about 24 hours, about 2 hours to about 12 hours, about 2 hours to about 6 hours, about 3 hours to about 48 hours, about 6 hours to about 48 hours, about 12 hours to about 48 hours, or about 24 hours to about 48 hours prior to and/or subsequent to administration of the nucleic acid construct and/or nuclease agent.

[0991] In one example, the B cell depleting agent is administered about 4 hours, about 8 hours, about 12 hours, about 18 hours, about 1 day, about 2 days, about 3 days, about 4 days, about 5 days, about 6 days, or about 1 week prior to administering the nucleic acid construct and/or nuclease agent. In another example, the B cell depleting agent is administered at least about 4 hours, at least about 8 hours, at least about 12 hours, at least about 18 hours, at least about 1 day, at least about 2 days, at least about 3 days, at least about 4 days, at least about 5 days, at least about 6 days, or at least about 1 week prior to administering the nucleic acid construct and/or nuclease agent. In another example, the B cell depleting agent is administered about 4 hours to about 24 hours, about 4 hours to about 12 hours, about 4 hours to about 8 hours, about 8 hours to about 24 hours, about 12 hours to about 24 hours, about 1 day to about 7 days, about 1 day to about 6 days, about 1 day to about 5 days, about 1 day to about 4 days, about 1 day to about 3 days, about 1 day to about 2 days, about 2 days to about 7 days, about 3 days to about 7 days, about 4 days to about 7 days, about 5 days to about 7 days, about 6 days to about 7 days, or about 1 day to about 3 days prior to administering the nucleic acid construct and/or nuclease agent.

[0992] In one example, the B cell depleting agent is administered about 1 week prior to administering the nucleic acid construct and/or nuclease agent. In another example, the B cell depleting agent is administered within about 1 week prior to administering the nucleic acid construct and/or nuclease agent. In another example, the B cell depleting agent is administered at least about 1 day, at least about 2 days, at least about 3 days, at least about 4 days, at least about 5 days, at least about 6 days, or at least about 1 week prior to administering the nucleic acid construct and/or nuclease agent. In another example, the B cell depleting agent is administered about 1 day, about 2 days, about 3 days, about 4 days, about 5 days, about 6 days, or about 1 week prior to administering the nucleic acid construct and/or nuclease agent. In another example, the B cell depleting agent is administered about 1 day to about 6 days, about 1 day to about 5 days, about 1 day to about 4 days, about 1 day to about 3 days, about 1 day to about 2 days, about 2 days to about 7 days, about 3 days to about 7 days, about 4 days to about 7 days, about 5 days to about 7 days, or about 6 days to about 7 days prior to administering the nucleic acid construct and/or nuclease agent.

[0993] In one example, the B cell depleting agent is administered about 4 hours, about 8 hours, about 12 hours, about 18 hours, about 1 day, about 2 days, about 3 days, about 4 days, about 5 days, about 6 days, or about 1 week prior to and subsequent to administering the nucleic acid construct and/or nuclease agent. In another example, the B cell depleting agent is administered at least about 4 hours, at least about 8 hours, at least about 12 hours, at least about 18 hours, at least about 1 day, at least about 2 days, at least about 3 days, at least about 4 days, at least about 5 days, at least about 6 days, or at least about 1 week prior to and subsequent to administering the nucleic acid construct and/or nuclease agent. In another example, the B cell depleting agent is administered about 4 hours to about 24 hours, about 4 hours to about 12 hours, about 4 hours to about 8 hours, about 8 hours to about 24 hours, about 12 hours to about 24 hours, about 1 day to about 7 days, about 1 day to about 6 days, about 1 day to about 5 days, about 1 day to about 4 days, about 1 day to about 3 days, about 1 day to about 2 days, about 2 days to about 7 days, about 3 days to about 7 days, about 4 days to about 7 days, about 5 days to about 7 days, about 6 days to about 7 days, or about 1 day to about 3 days prior to and subsequent to administering the nucleic acid construct and/or nuclease agent.

[0994] In one example, the B cell depleting agent is administered about 4 hours, about 8 hours, about 12 hours, about 18 hours, about 1 day, about 2 days, about 3 days, about 4 days, about 5 days, about 6 days, or about 1 week after administering the nucleic acid construct and/or nuclease agent. In another example, the B cell depleting agent is administered at least about 4 hours, at least about 8 hours, at least about 12 hours, at least about 18 hours, at least about 1 day, at least about 2 days, at least about 3 days, at least about 4 days, at least about 5 days, at least about 6 days, or at least about 1 week after administering the nucleic acid construct and/or nuclease agent. In another example, the B cell depleting agent is administered about 4 hours to about 24 hours, about 4 hours to about 12 hours, about 4 hours to about 8 hours, about 8 hours to about 24 hours, about 12 hours to about 24 hours, about 1 day to about 7 days, about 1 day to about 6 days, about 1 day to about 5 days, about 1 day to about 4 days, about 1 day to about 3 days, about 1 day to about 2 days, about 2 days to about 7 days, about 3 days to about 7 days, about 4 days to about 7 days, about 5 days to about 7 days, about 6 days to about 7 days, or about 1 day to about 3 days after administering the nucleic acid construct and/or nuclease agent.

[0995] In any of the above methods, the nucleic acid construct can be administered simultaneously with the nuclease agent (e.g., CRISPR/Cas system) or not simultaneously (e.g., sequentially in any combination). For example, in a method comprising administering a composition comprising the nucleic acid construct and a nuclease agent, they can be administered separately. For example, the nucleic acid construct can be administered prior to the nuclease agent, subsequent to the nuclease agent, or at the same time as the nuclease agent. Any suitable methods of administering nucleic acid constructs and nuclease agents to cells can be used, particularly methods of administering to the liver, and examples of such methods are described in more detail elsewhere herein. In methods of treatment or in methods of targeting a cell in vivo in a subject, the nucleic acid construct can be inserted in particular types of cells in the subject. The method and vehicle for introducing nucleic acid construct and/or the nuclease agent into the subject can affect which types of cells in the subject are targeted. In some methods, for example, the nucleic acid construct is inserted into a target genomic locus (e.g., an endogenous ALB locus) in liver cells, such as hepatocytes. Methods and vehicles for introducing such constructs and nuclease agents into the subject (including methods and vehicles that target the liver or hepatocytes, such as lipid nanoparticle-mediated delivery and AAV-mediated delivery (e.g., rAAV8-mediated delivery) and intravenous injection), are disclosed in more detail elsewhere herein.

[0996] In methods in which a composition comprising a nucleic acid construct (or vector or LNP) and a nuclease agent is administered (i.e., in methods in which a nucleic acid construct (or vector or LNP) and a nuclease agent are both administered), the nucleic acid construct and the nuclease agent can be administered simultaneously. Alternatively, the nucleic acid construct and the nuclease agent can be administered sequentially in any order. For example, the nucleic acid construct can be administered after the nuclease agent, or the nuclease agent can be administered after the nucleic acid construct. For example, the nuclease agent can be administered about 1 hour to about 48 hours, about 1 hour to about 24 hours, about 1 hour to about 12 hours, about 1 hour to about 6 hours, about 1 hour to about 2 hours, about 2 hours to about 48 hours, about 2 hours to about 24 hours, about 2 hours to about 12 hours, about 2 hours to about 6 hours, about 3 hours to about 48 hours, about 6 hours to about 48 hours, about 12 hours to about 48 hours, or about 24 hours to about 48 hours prior to or subsequent to administration of the nucleic acid construct.

[0997] In one example, the nucleic acid construct is administered about 4 hours, about 8 hours, about 12 hours, about 18 hours, about 1 day, about 2 days, about 3 days, about 4 days, about 5 days, about 6 days, or about 1 week prior to administering the nuclease agent. In another example, the nucleic acid construct is administered at least about 4 hours, at least about 8 hours, at least about 12 hours, at least about 18 hours, at least about 1 day, at least about 2 days, at least about 3 days, at least about 4 days, at least about 5 days, at least about 6 days, or at least about 1 week prior to administering the nuclease agent. In another example, the nucleic acid construct is administered about 4 hours to about 24 hours, about 4 hours to about 12 hours, about 4 hours to about 8 hours, about 8 hours to about 24 hours, about 12 hours to about 24 hours, about 1 day to about 7 days, about 1 day to about 6 days, about 1 day to about 5 days, about 1 day to about 4 days, about 1 day to about 3 days, about 1 day to about 2 days, about 2 days to about 7 days, about 3 days to about 7 days, about 4 days to about 7 days, about 5 days to about 7 days, about 6 days to about 7 days, or about 1 day to about 3 days prior to administering the nuclease agent.

[0998] In one example, the nucleic acid construct is administered about 4 hours, about 8 hours, about 12 hours, about 18 hours, about 1 day, about 2 days, about 3 days, about 4 days, about 5 days, about 6 days, or about 1 week after administering the nuclease agent. In another example, the nucleic acid construct is administered at least about 4 hours, at least about 8 hours, at least about 12 hours, at least about 18 hours, at least about 1 day, at least about 2 days, at least about 3 days, at least about 4 days, at least about 5 days, at least about 6 days, or at least about 1 week after administering the nuclease agent. In another example, the nucleic acid construct is administered about 4 hours to about 24 hours, about 4 hours to about 12 hours, about 4 hours to about 8 hours, about 8 hours to about 24 hours, about 12 hours to about 24 hours, about 1 day to about 7 days, about 1 day to about 6 days, about 1 day to about 5 days, about 1 day to about 4 days, about 1 day to about 3 days, about 1 day to about 2 days, about 2 days to about 7 days, about 3 days to about 7 days, about 4 days to about 7 days, about 5 days to about 7 days, about 6 days to about 7 days, or about 1 day to about 3 days after administering the nuclease agent.

[0999] In any of the above methods, the nucleic acid construct and the nuclease agent (e.g., CRISPR/Cas system) can be administered using any suitable delivery system and known method. The nuclease agent components and nucleic acid construct (e.g., the guide RNA, Cas protein, and nucleic acid construct) can be delivered individually or together in any combination, using the same or different delivery methods as appropriate.

[1000] In methods in which a CRISPR/Cas system is used, a guide RNA can be introduced into or administered to a subject or cell, for example, in the form of an RNA (e.g., in vitro transcribed RNA, such as the modified guide RNAs disclosed herein) or in the form of a DNA encoding the guide RNA. When introduced in the form of a DNA, the DNA encoding a guide RNA can be operably linked to a promoter active in the cell or in a cell in the subject. For example, a guide RNA may be delivered via AAV and expressed in vivo under a U6 promoter. Such DNAs can be in one or more expression constructs. For example, such expression constructs can be components of a single nucleic acid molecule. Alternatively, they can be separated in any combination among two or more nucleic acid molecules (i.e., DNAs encoding one or more CRISPR RNAs and DNAs encoding one or more tracrRNAs can be components of a separate nucleic acid molecules).

[1001] Likewise, Cas proteins can be introduced into a subject or cell in any form. For example, a Cas protein can be provided in the form of a protein, such as a Cas protein complexed with a gRNA. Alternatively, a Cas protein can be provided in the form of a nucleic acid encoding the Cas protein, such as an RNA (e.g., messenger RNA (mRNA)), such as a modified mRNA as disclosed herein, or DNA). Optionally, the nucleic acid encoding the Cas protein can be codon optimized for efficient translation into protein in a particular cell or organism. For example, the nucleic acid encoding the Cas protein can be modified to substitute codons having a higher frequency of usage in a mammalian cell, a human cell, a rodent cell, a mouse cell, a rat cell, or any other host cell of interest, as compared to the naturally occurring polynucleotide sequence. When a nucleic acid encoding the Cas protein is introduced into a cell or a subject, the Cas protein can be transiently, conditionally, or constitutively expressed in the cell or in a cell in the subject.

[1002] In one example, the Cas protein is introduced in the form of an mRNA (e.g., a modified mRNA as disclosed herein), and the guide RNA is introduced in the form of RNA such as a modified gRNA as disclosed herein (e.g., together within the same lipid nanoparticle). Guide RNAs can be modified as disclosed elsewhere herein. Likewise, Cas mRNAs can be modified as disclosed elsewhere herein.

[1003] In methods in which a nucleic acid construct is inserted following cleavage by a gene-editing system (e.g., a Cas protein), the gene-editing system (e.g., Cas protein) can cleave the target genomic locus to create a single-strand break (nick) or double-strand break, and the cleaved or nicked locus can be repaired by insertion of the nucleic acid construct via non-homologous end joining (NHEJ)-mediated insertion or homology-directed repair. Optionally, repair with the nucleic acid construct removes or disrupts the guide RNA target sequence(s) so that alleles that have been targeted cannot be re-targeted by the CRISPR/Cas reagents.

[1004] As explained in more detail elsewhere herein, the nucleic acid constructs can comprise deoxyribonucleic acid (DNA) or ribonucleic acid (RNA), they can be single-stranded or double-stranded, and they can be in linear or circular form. The nucleic acid constructs can be naked nucleic acids or can be delivered by viruses, such as AAV. In a specific example, the nucleic acid construct can be delivered via AAV and can be capable of insertion into the target genomic locus (e.g., a safe harbor gene, an ALB gene, or intron 1 of an ALB gene) by non-homologous end joining (e.g., the nucleic acid construct can be one that does not comprise a homology arm).

[1005] Some nucleic acid constructs are capable of insertion by non-homologous end joining. In some cases, such nucleic acid constructs do not comprise a homology arm. For example, such nucleic acid constructs can be inserted into a blunt end double-strand break following cleavage with a Cas protein. In a specific example, the nucleic acid construct can be delivered via AAV and can be capable of insertion by non-homologous end joining (e.g., the nucleic acid construct can be one that does not comprise a homology arm).

[1006] In another example, the nucleic acid construct can be inserted via homology-independent targeted integration. For example, the nucleic acid construct can be flanked on each side by a guide RNA target sequence (e.g., the same target site as in the target genomic locus, and the CRISPR/Cas reagent (Cas protein and guide RNA) being used to cleave the target site in the target genomic locus). The Cas protein can then cleave the target sites flanking the nucleic acid insert. In a specific example, the nucleic acid construct is delivered AAV-mediated delivery, and cleavage of the target sites flanking the nucleic acid insert can remove the inverted terminal repeats (ITRs) of the AAV. In some methods, the target site in the target genomic locus (e.g., a guide RNA target sequence including the flanking protospacer adjacent motif) is no longer present if the nucleic acid insert is inserted into the target genomic locus in the correct orientation but it is reformed if the nucleic acid insert is inserted into the target genomic locus in the opposite orientation.

[1007] The methods disclosed herein can comprise introducing or administering into a subject (e.g., an animal or mammal, such as a human) or cell a nucleic acid construct and optionally a nuclease agent such as CRISPR/Cas reagents, including in the form of nucleic acids (e.g., DNA or RNA), proteins, or nucleic-acid-protein complexes. “Introducing” or “administering” includes presenting to the cell or subject the molecule(s) (e.g., nucleic acid(s) or protein(s)) in such a manner that it gains access to the interior of the cell or to the interior of cells within the subject. The introducing can be accomplished by any means, and two or more of the components (e.g., two of the components, or all of the components) can be introduced into the cell or subject simultaneously or sequentially in any combination. For example, a Cas protein can be introduced into a cell or subject before introduction of a guide RNA, or it can be introduced following introduction of the guide RNA. As another example, a multidomain therapeutic protein nucleic acid construct can be introduced prior to the introduction of a Cas protein and a guide RNA, or it can be introduced following introduction of the Cas protein and the guide RNA (e.g., the multidomain therapeutic protein nucleic acid construct can be administered about 1, 2, 3, 4, 8, 12, 24, 36, 48, or 72 hours before or after introduction of the Cas protein and the guide RNA). See, e.g., US 2015/0240263 and US 2015/0110762, each of which is herein incorporated by reference in its entirety for all purposes. In addition, two or more of the components can be introduced into the cell or subject by the same delivery method or different delivery methods. Similarly, two or more of the components can be introduced into a subject by the same route of administration or different routes of administration.

[1008] A guide RNA can be introduced into a subject or cell, for example, in the form of an RNA (e.g., in vitro transcribed RNA) or in the form of a DNA encoding the guide RNA. Guide RNAs can be modified as disclosed elsewhere herein. When introduced in the form of a DNA, the DNA encoding a guide RNA can be operably linked to a promoter active in the cell or in a cell in the subject. For example, a guide RNA may be delivered via AAV and expressed in vivo under a U6 promoter. Such DNAs can be in one or more expression constructs. For example, such expression constructs can be components of a single nucleic acid molecule. Alternatively, they can be separated in any combination among two or more nucleic acid molecules (i.e., DNAs encoding one or more CRISPR RNAs and DNAs encoding one or more tracrRNAs can be components of a separate nucleic acid molecules).

[1009] Likewise, Cas proteins can be provided in any form. For example, a Cas protein can be provided in the form of a protein, such as a Cas protein complexed with a gRNA. Alternatively, a Cas protein can be provided in the form of a nucleic acid encoding the Cas protein, such as an RNA (e.g., messenger RNA (mRNA)) or DNA. Cas RNAs can be modified as disclosed elsewhere herein. Optionally, the nucleic acid encoding the Cas protein can be codon optimized for efficient translation into protein in a particular cell or organism. For example, the nucleic acid encoding the Cas protein can be modified to substitute codons having a higher frequency of usage in a mammalian cell, a human cell, a rodent cell, a mouse cell, a rat cell, or any other host cell of interest, as compared to the naturally occurring polynucleotide sequence. When a nucleic acid encoding the Cas protein is introduced into a cell or a subject, the Cas protein can be transiently, conditionally, or constitutively expressed in the cell or in a cell in the subject.

[1010] Nucleic acids encoding Cas proteins or guide RNAs can be operably linked to a promoter in an expression construct. Expression constructs include any nucleic acid constructs capable of directing expression of a gene or other nucleic acid sequence of interest (e.g., a Cas gene) and which can transfer such a nucleic acid sequence of interest to a target cell. For example, the nucleic acid encoding the Cas protein can be in a vector comprising a DNA encoding one or more gRNAs. Alternatively, it can be in a vector or plasmid that is separate from the vector comprising the DNA encoding one or more gRNAs. Suitable promoters that can be used in an expression construct include promoters active, for example, in one or more of a eukaryotic cell, a human cell, a non-human cell, a mammalian cell, a non-human mammalian cell, a rodent cell, a mouse cell, a rat cell, a hamster cell, a pluripotent cell, an embryonic stem (ES) cell, an adult stem cell, a developmentally restricted progenitor cell, an induced pluripotent stem (iPS) cell, or a one-cell stage embryo. For example, a suitable promoter can be active in a liver cell such as a hepatocyte. Such promoters can be, for example, conditional promoters, inducible promoters, constitutive promoters, or tissue-specific promoters. Optionally, the promoter can be a bidirectional promoter driving expression of both a Cas protein in one direction and a guide RNA in the other direction. Such bidirectional promoters can consist of (1) a complete, conventional, unidirectional Pol III promoter that contains 3 external control elements: a distal sequence element (DSE), a proximal sequence element (PSE), and a TATA box; and (2) a second basic Pol III promoter that includes a PSE and a TATA box fused to the 5′ terminus of the DSE in reverse orientation. For example, in the H1 promoter, the DSE is adjacent to the PSE and the TATA box, and the promoter can be rendered bidirectional by creating a hybrid promoter in which transcription in the reverse direction is controlled by appending a PSE and TATA box derived from the U6 promoter. See, e.g., US 2016/0074535, herein incorporated by references in its entirety for all purposes. Use of a bidirectional promoter to express genes encoding a Cas protein and a guide RNA simultaneously allows for the generation of compact expression cassettes to facilitate delivery. In preferred embodiments, promotors are accepted by regulatory authorities for use in humans. In certain embodiments, promotors drive expression in a liver cell.

[1011] Molecules (e.g., Cas proteins or guide RNAs or nucleic acids encoding) introduced into the subject or cell can be provided in compositions comprising a carrier increasing the stability of the introduced molecules (e.g., prolonging the period under given conditions of storage (e.g., −20° C., 4° C., or ambient temperature) for which degradation products remain below a threshold, such below 0.5% by weight of the starting nucleic acid or protein; or increasing the stability in vivo). Non-limiting examples of such carriers include poly(lactic acid) (PLA) microspheres, poly(D,L-lactic-coglycolic-acid) (PLGA) microspheres, liposomes, micelles, inverse micelles, lipid cochleates, and lipid microtubules.

[1012] Various methods and compositions are provided herein to allow for introduction of molecule (e.g., a nucleic acid or protein) into a cell or subject. Methods for introducing molecules into various cell types are known and include, for example, stable transfection methods, transient transfection methods, and virus-mediated methods.

[1013] Transfection protocols as well as protocols for introducing molecules into cells may vary. Non-limiting transfection methods include chemical-based transfection methods using liposomes; nanoparticles; calcium phosphate (Graham et al. (1973) Virology 52 (2): 456-67, Bacchetti et al. (1977) Proc. Natl. Acad. Sci. U.S.A. 74 (4):1590-4, and Kriegler, M (1991). Transfer and Expression: A Laboratory Manual. New York: W. H. Freeman and Company. pp. 96-97); dendrimers; or cationic polymers such as DEAE-dextran or polyethylenimine. Non-chemical methods include electroporation, sonoporation, and optical transfection. Particle-based transfection includes the use of a gene gun, or magnet-assisted transfection (Bertram (2006) Current Pharmaceutical Biotechnology 7, 277-28). Viral methods can also be used for transfection.

[1014] Introduction of nucleic acids or proteins into a cell can also be mediated by electroporation, by intracytoplasmic injection, by viral infection, by adenovirus, by adeno-associated virus, by lentivirus, by retrovirus, by transfection, by lipid-mediated transfection, or by nucleofection. Nucleofection is an improved electroporation technology that enables nucleic acid substrates to be delivered not only to the cytoplasm but also through the nuclear membrane and into the nucleus. In addition, use of nucleofection in the methods disclosed herein typically requires much fewer cells than regular electroporation (e.g., only about 2 million compared with 7 million by regular electroporation). In one example, nucleofection is performed using the LONZA® NUCLEOFECTOR™ system.

[1015] Introduction of molecules (e.g., nucleic acids or proteins) into a cell (e.g., a zygote) can also be accomplished by microinjection. In zygotes (i.e., one-cell stage embryos), microinjection can be into the maternal and/or paternal pronucleus or into the cytoplasm. If the microinjection is into only one pronucleus, the paternal pronucleus is preferable due to its larger size. Microinjection of an mRNA is preferably into the cytoplasm (e.g., to deliver mRNA directly to the translation machinery), while microinjection of a Cas protein or a polynucleotide encoding a Cas protein or encoding an RNA is preferable into the nucleus/pronucleus. Alternatively, microinjection can be carried out by injection into both the nucleus/pronucleus and the cytoplasm: a needle can first be introduced into the nucleus/pronucleus and a first amount can be injected, and while removing the needle from the one-cell stage embryo a second amount can be injected into the cytoplasm. If a Cas protein is injected into the cytoplasm, the Cas protein preferably comprises a nuclear localization signal to ensure delivery to the nucleus/pronucleus. Methods for carrying out microinjection are well known. See, e.g., Nagy et al. (Nagy A, Gertsenstein M, Vintersten K, Behringer R., 2003, Manipulating the Mouse Embryo. Cold Spring Harbor, New York: Cold Spring Harbor Laboratory Press); see also Meyer et al. (2010) Proc. Natl. Acad. Sci. U.S.A. 107:15022-15026 and Meyer et al. (2012) Proc. Natl. Acad. Sci. U.S.A. 109:9354-9359, each of which is herein incorporated by reference in its entirety for all purposes.

[1016] Other methods for introducing molecules (e.g., nucleic acid or proteins) into a cell or subject can include, for example, vector delivery, particle-mediated delivery, exosome-mediated delivery, lipid-nanoparticle-mediated delivery, cell-penetrating-peptide-mediated delivery, or implantable-device-mediated delivery. As specific examples, a nucleic acid or protein can be introduced into a cell or subject in a carrier such as a poly(lactic acid) (PLA) microsphere, a poly(D,L-lactic-coglycolic-acid) (PLGA) microsphere, a liposome, a micelle, an inverse micelle, a lipid cochleate, or a lipid microtubule. Some specific examples of delivery to a subject include hydrodynamic delivery, virus-mediated delivery (e.g., adeno-associated virus (AAV)-mediated delivery), and lipid-nanoparticle-mediated delivery.

[1017] Introduction of nucleic acids and proteins into cells or subjects can be accomplished by hydrodynamic delivery (HDD). For gene delivery to parenchymal cells, only essential DNA sequences need to be injected via a selected blood vessel, eliminating safety concerns associated with current viral and synthetic vectors. When injected into the bloodstream, DNA is capable of reaching cells in the different tissues accessible to the blood. Hydrodynamic delivery employs the force generated by the rapid injection of a large volume of solution into the incompressible blood in the circulation to overcome the physical barriers of endothelium and cell membranes that prevent large and membrane-impermeable compounds from entering parenchymal cells. In addition to the delivery of DNA, this method is useful for the efficient intracellular delivery of RNA, proteins, and other small compounds in vivo. See, e.g., Bonamassa et al. (2011) Pharm. Res. 28(4):694-701, herein incorporated by reference in its entirety for all purposes.

[1018] Introduction of nucleic acids can also be accomplished by virus-mediated delivery, such as AAV-mediated delivery or lentivirus-mediated delivery. Other exemplary viruses/viral vectors include retroviruses, adenoviruses, vaccinia viruses, poxviruses, and herpes simplex viruses. The viruses can infect dividing cells, non-dividing cells, or both dividing and non-dividing cells. The viruses can integrate into the host genome or alternatively do not integrate into the host genome. Such viruses can also be engineered to have reduced immunity. The viruses can be replication-competent or can be replication-defective (e.g., defective in one or more genes necessary for additional rounds of virion replication and/or packaging). Viruses can cause transient expression or longer-lasting expression. Viral vector may be genetically modified from their wild type counterparts. For example, the viral vector may comprise an insertion, deletion, or substitution of one or more nucleotides to facilitate cloning or such that one or more properties of the vector is changed. Such properties may include packaging capacity, transduction efficiency, immunogenicity, genome integration, replication, transcription, and translation. In some examples, a portion of the viral genome may be deleted such that the virus is capable of packaging exogenous sequences having a larger size. In some examples, the viral vector may have an enhanced transduction efficiency. In some examples, the immune response induced by the virus in a host may be reduced. In some examples, viral genes (such as integrase) that promote integration of the viral sequence into a host genome may be mutated such that the virus becomes non-integrating. In some examples, the viral vector may be replication defective. In some examples, the viral vector may comprise exogenous transcriptional or translational control sequences to drive expression of coding sequences on the vector. In some examples, the virus may be helper-dependent. For example, the virus may need one or more helper virus to supply viral components (such as viral proteins) required to amplify and package the vectors into viral particles. In such a case, one or more helper components, including one or more vectors encoding the viral components, may be introduced into a host cell or population of host cells along with the vector system described herein. In other examples, the virus may be helper-free. For example, the virus may be capable of amplifying and packaging the vectors without a helper virus. In some examples, the vector system described herein may also encode the viral components required for virus amplification and packaging.

[1019] Exemplary viral titers (e.g., AAV titers) include about 10¹², about 10¹³, about 10¹⁴, about 10¹⁵, and about 10¹⁶ vector genomes (vg)/mL, or between about 10¹² to about 10¹⁶, between about 10¹² to about 10¹⁵, between about 10¹² to about 10¹⁴, between about 10¹² to about 10¹³, between about 10¹³ to about 10¹⁶, between about 10¹⁴ to about 10¹⁶, between about 10¹⁵ to about 10¹⁶, or between about 10¹³ to about 10¹⁵ vg/mL. Other exemplary viral titers (e.g., AAV titers) include about 10¹², about 10¹³, about 10¹⁴, about 10¹⁵, and about 10¹⁶ vector genomes (vg)/kg of body weight, or between about 10¹² to about 10¹⁶, between about 10¹² to about 10¹⁵, between about 10¹² to about 10¹⁴, between about 10¹² to about 10¹³, between about 10¹³ to about 10¹⁶, between about 10¹⁴ to about 10¹⁶, between about 10¹⁵ to about 10¹⁶, or between about 10¹³ to about 10¹⁵ vg/kg of body weight. In one example, the viral titer is between about 10¹³ to about 10¹⁴ vg/mL or vg/kg. In another example, the viral titer is between about 10¹² to about 10¹³ vg/mL or vg/kg (e.g., between about 10¹² to about 10¹³ vg/kg). In another example, the viral titer is between about 10¹² to about 10¹⁴ vg/mL or vg/kg (e.g., between about 10¹² to about 10¹⁴ vg/kg). For example, the viral titer can be between about 1.5E12 to about 1.5E13 vg/kg, can be about 1.5E12 vg/kg, or can be about 1.5E13 vg/kg. AAVs for use in the methods are discussed in more detail elsewhere herein. In another example, the viral titer is about 1E12 to about 2E14 vg/kg (e.g., without plasma cell depletion and redosing). In another example, the viral titer is about 3E11 vg/kg to about 5E13 vg/kg (e.g., 2-3× lower with plasma cell depletion, due to 2-3 separate administrations with redosing). Use of the plasma cell depleting agents or combinations comprising plasma cell depleting agents allows redosing, permitting step-wise dosing with lower doses (e.g., step-wise dosing of 2-3 doses with each dose being 2-3× lower than a dose would be in a one-time administration (e.g., without plasma cell depletion). In another example, the viral titer is about 1E12 to about 2E14 vg/kg (e.g., without B cell depletion and redosing). In another example, the viral titer is about 3E11 vg/kg to about 5E13 vg/kg (e.g., 2-3× lower with B cell depletion, due to 2-3 separate administrations with redosing). Use of the B cell depleting agents allows redosing, permitting step-wise dosing with lower doses (e.g., step-wise dosing of 2-3 doses with each dose being 2-3× lower than a dose would be in a one-time administration (e.g., without B cell depletion).

[1020] Introduction of nucleic acids and proteins can also be accomplished by lipid nanoparticle (LNP)-mediated delivery. For example, LNP-mediated delivery can be used to deliver a combination of Cas mRNA and guide RNA or a combination of Cas protein and guide RNA. LNP-mediated delivery can be used to deliver a guide RNA in the form of RNA. In a specific example, the guide RNA and the Cas protein are each introduced in the form of RNA via LNP-mediated delivery in the same LNP. As discussed in more detail elsewhere herein, one or more of the RNAs can be modified. For example, guide RNAs can be modified to comprise one or more stabilizing end modifications at the 5′ end and/or the 3′ end. Such modifications can include, for example, one or more phosphorothioate linkages at the 5′ end and/or the 3′ end or one or more 2′-O-methyl modifications at the 5′ end and/or the 3′ end. As another example, Cas mRNA modifications can include substitution with pseudouridine (e.g., fully substituted with pseudouridine), 5′ caps, and polyadenylation. As another example, Cas mRNA modifications can include substitution with N1-methyl-pseudouridine (e.g., fully substituted with N1-methyl-pseudouridine), 5′ caps, and polyadenylation. Other modifications are also contemplated as disclosed elsewhere herein. Delivery through such methods can result in transient Cas expression and/or transient presence of the guide RNA, and the biodegradable lipids improve clearance, improve tolerability, and decrease immunogenicity. Lipid formulations can protect biological molecules from degradation while improving their cellular uptake. Lipid nanoparticles are particles comprising a plurality of lipid molecules physically associated with each other by intermolecular forces. These include microspheres (including unilamellar and multilamellar vesicles, e.g., liposomes), a dispersed phase in an emulsion, micelles, or an internal phase in a suspension. Such lipid nanoparticles can be used to encapsulate one or more nucleic acids or proteins for delivery. Formulations which contain cationic lipids are useful for delivering polyanions such as nucleic acids. Other lipids that can be included are neutral lipids (i.e., uncharged or zwitterionic lipids), anionic lipids, helper lipids that enhance transfection, and stealth lipids that increase the length of time for which nanoparticles can exist in vivo. Examples of suitable cationic lipids, neutral lipids, anionic lipids, helper lipids, and stealth lipids can be found in WO 2016/010840 A1 and WO 2017/173054 A1, each of which is herein incorporated by reference in its entirety for all purposes. An exemplary lipid nanoparticle can comprise a cationic lipid and one or more other components. In one example, the other component can comprise a helper lipid such as cholesterol. In another example, the other components can comprise a helper lipid such as cholesterol and a neutral lipid such as DSPC. In another example, the other components can comprise a helper lipid such as cholesterol, an optional neutral lipid such as DSPC, and a stealth lipid such as S010, S024, S027, S031, or S033.

[1021] The LNP may contain one or more or all of the following: (i) a lipid for encapsulation and for endosomal escape; (ii) a neutral lipid for stabilization; (iii) a helper lipid for stabilization; and (iv) a stealth lipid. See, e.g., Finn et al. (2018) Cell Rep. 22(9):2227-2235 and WO 2017/173054 A1, each of which is herein incorporated by reference in its entirety for all purposes. In certain LNPs, the cargo can include a guide RNA or a nucleic acid encoding a guide RNA. In certain LNPs, the cargo can include an mRNA encoding a Cas nuclease, such as Cas9, and a guide RNA or a nucleic acid encoding a guide RNA. In certain LNPs, the cargo can include a multidomain therapeutic protein nucleic acid construct. In certain LNPs, the cargo can include an mRNA encoding a Cas nuclease, such as Cas9, a guide RNA or a nucleic acid encoding a guide RNA, and a multidomain therapeutic protein nucleic acid construct. LNPs for use in the methods are described in more detail elsewhere herein.

[1022] Exemplary dosing of LNPs includes about 0.1, about 0.25, about 0.3, about 0.5, about 1, about 2, about 3, about 4, about 5, about 6, about 8, or about 10 mg/kg body weight (mpk) or about 0.1 to about 10, about 0.25 to about 10, about 0.3 to about 10, about 0.5 to about 10, about 1 to about 10, about 2 to about 10, about 3 to about 10, about 4 to about 10, about 5 to about 10, about 6 to about 10, about 8 to about 10, about 0.1 to about 8, about 0.1 to about 6, about 0.1 to about 5, about 0.1 to about 4, about 0.1 to about 3, about 0.1 to about 2, about 0.1 to about 1, about 0.1 to about 0.5, about 0.1 to about 0.3, about 0.1 to about 0.25, about 0.25 to about 8, about 0.3 to about 6, about 0.5 to about 5, about 1 to about 5, or about 2 to about 3 mg/kg body weight with respect to total RNA (Cas9 mRNA and gRNA) cargo content. Such LNPs can be administered, for example, intravenously. In one example, LNP doses between about 0.01 mg/kg and about 10 mg/kg, between about 0.1 and about 10 mg/kg, or between about 0.01 and about 0.3 mg/kg can be used. For example, LNP doses of about 0.01, about 0.03, about 0.1, about 0.3, about 1, about 3, or about 10 mg/kg can be used. Additional exemplary dosing of LNPs includes about 0.1, about 0.25, about 0.3, about 0.5, about 1, about 2, about 3, about 4, about 5, about 6, about 8, or about 10 mg/kg (mpk) body weight or about 0.1 to about 10, about 0.25 to about 10, about 0.3 to about 10, about 0.5 to about 10, about 1 to about 10, about 2 to about 10, about 3 to about 10, about 4 to about 10, about 5 to about 10, about 6 to about 10, about 8 to about 10, about 0.1 to about 8, about 0.1 to about 6, about 0.1 to about 5, about 0.1 to about 4, about 0.1 to about 3, about 0.1 to about 2, about 0.1 to about 1, about 0.1 to about 0.5, about 0.1 to about 0.3, about 0.1 to about 0.25, about 0.25 to about 8, about 0.3 to about 6, about 0.5 to about 5, about 1 to about 5, or about 2 to about 3 mg/kg body weight with respect to total RNA (Cas9 mRNA and gRNA) cargo content. Such LNPs can be administered, for example, intravenously. In one example, LNP doses between about 0.01 mg/kg and about 10 mg/kg, between about 0.1 and about 10 mg/kg, or between about 0.01 and about 0.3 mg/kg can be used. For example, LNP doses of about 0.01, about 0.03, about 0.1, about 0.3, about 0.5, about 1, about 2, about 3, or about 10 mg/kg can be used. In another example, LNP doses between about 0.5 and about 10, between about 0.5 and about 5, between about 0.5 and about 3, between about 1 and about 10, between about 1 and about 5, between about 1 and about 3, or between about 1 and about 2 mg/kg can be used. In another example, LNP doses between about 0.5 and about 3, between about 0.5 and about 2.5, between about 0.5 and about 2, between about 0.5 and about 1.5, between about 0.5 and about 1, between about 1 and about 3, between about 1 and about 2.5, between about 1 and about 2, or between about 1 and about 1.5 mg/kg can be used. In another example, an LNP dose of about 1 mg/kg can be used.

[1023] The mode of delivery can be selected to decrease immunogenicity. For example, a Cas protein and a gRNA may be delivered by different modes (e.g., bi-modal delivery). These different modes may confer different pharmacodynamics or pharmacokinetic properties on the subject delivered molecule (e.g., Cas or nucleic acid encoding, gRNA or nucleic acid encoding, or multidomain therapeutic protein nucleic acid construct). For example, the different modes can result in different tissue distribution, different half-life, or different temporal distribution. Some modes of delivery (e.g., delivery of a nucleic acid vector that persists in a cell by autonomous replication or genomic integration) result in more persistent expression and presence of the molecule, whereas other modes of delivery are transient and less persistent (e.g., delivery of an RNA or a protein). Delivery of Cas proteins in a more transient manner, for example, as mRNA or protein, can ensure that the Cas/gRNA complex is only present and active for a short period of time and can reduce immunogenicity caused by peptides from the bacterially-derived Cas enzyme being displayed on the surface of the cell by MHC molecules. Such transient delivery can also reduce the possibility of off-target modifications.

[1024] Administration in vivo can be by any suitable route including, for example, parenteral, intravenous, oral, subcutaneous, intra-arterial, intracranial, intrathecal, intraperitoneal, topical, intranasal, or intramuscular. Systemic modes of administration include, for example, oral and parenteral routes. Examples of parenteral routes include intravenous, intraarterial, intraosseous, intramuscular, intradermal, subcutaneous, intranasal, and intraperitoneal routes. A specific example is intravenous infusion. Nasal instillation and intravitreal injection are other specific examples. Local modes of administration include, for example, intrathecal, intracerebroventricular, intraparenchymal (e.g., localized intraparenchymal delivery to the striatum (e.g., into the caudate or into the putamen), cerebral cortex, precentral gyrus, hippocampus (e.g., into the dentate gyrus or CA3 region), temporal cortex, amygdala, frontal cortex, thalamus, cerebellum, medulla, hypothalamus, tectum, tegmentum, or substantia nigra), intraocular, intraorbital, subconjuctival, intravitreal, subretinal, and transscleral routes. Significantly smaller amounts of the components (compared with systemic approaches) may exert an effect when administered locally (for example, intraparenchymal or intravitreal) compared to when administered systemically (for example, intravenously). Local modes of administration may also reduce or eliminate the incidence of potentially toxic side effects that may occur when therapeutically effective amounts of a component are administered systemically. In a specific example, administration in vivo is intravenous.

[1025] Administration in vivo can be by any suitable route including, for example, parenteral, intravenous, oral, subcutaneous, intra-arterial, intracranial, intrathecal, intraperitoneal, topical, intranasal, or intramuscular. A specific example is intravenous infusion.

[1026] Administration in vivo can be by any suitable route including, for example, systemic routes of administration such as parenteral administration, e.g., intravenous, subcutaneous, intra-arterial, or intramuscular. In a specific example, administration in vivo is intravenous.

[1027] Compositions comprising the guide RNAs and/or Cas proteins (or nucleic acids encoding the guide RNAs and/or Cas proteins) can be formulated using one or more physiologically and pharmaceutically acceptable carriers, diluents, excipients or auxiliaries. The formulation can depend on the route of administration chosen. Pharmaceutically acceptable means that the carrier, diluent, excipient, or auxiliary is compatible with the other ingredients of the formulation and not substantially deleterious to the recipient thereof. In a specific example, the route of administration and/or formulation or chosen for delivery to the liver (e.g., hepatocytes).

[1028] The frequency of administration and the number of dosages can depend on a number of factors. The introduction of nucleic acids or proteins into the cell or subject can be performed one time or multiple times over a period of time. For example, the introduction can be performed only once over a period of time, at least two times over a period of time, at least three times over a period of time, at least four times over a period of time, at least five times over a period of time, at least six times over a period of time, at least seven times over a period of time, at least eight times over a period of time, at least nine times over a period of times, at least ten times over a period of time, at least eleven times, at least twelve times over a period of time, at least thirteen times over a period of time, at least fourteen times over a period of time, at least fifteen times over a period of time, at least sixteen times over a period of time, at least seventeen times over a period of time, at least eighteen times over a period of time, at least nineteen times over a period of time, or at least twenty times over a period of time. In some methods, a single administration of the nucleic acid construct (or a single administration of the nucleic acid construct and nuclease agent (e.g., Cas protein and guide RNA)) is sufficient to increase expression of polypeptide of interest to a desirable level. In other methods, more than one administration may be beneficial to maximize therapeutic effect.

[1029] The methods disclosed herein can increase polypeptide of interest protein levels and/or polypeptide of interest activity levels in a cell or subject (e.g., circulating, serum, or plasma levels in a subject) and can comprise measuring polypeptide of interest protein levels and/or polypeptide of interest activity levels in a cell or subject (e.g., circulating, serum, or plasma levels in a subject). In one example, the methods result in increased expression of the polypeptide of interest in the subject compared to a method comprising administering an episomal expression vector encoding the polypeptide of interest. For example, the methods can result in increased serum levels of the polypeptide of interest in the subject compared to a method comprising administering an episomal expression vector encoding the polypeptide of interest. The methods can also result in increased polypeptide of interest activity in the subject compared to a method comprising administering an episomal expression vector encoding the polypeptide of interest.

[1030] In some methods, polypeptide of interest activity and/or expression levels in a subject are increased to about or at least about 2%, about or at least about 10%, about or at least about 25%, about or at least about 40%, about or at least about 50%, about or at least about 75%, or at least about 100%, or more, of normal level. In some methods, polypeptide of interest activity and/or expression levels in a subject are increased to about or at least about 40%, about or at least about 50%, about or at least about 75%, or at least about 100%, or more, of normal level.

[1031] In some methods, circulating polypeptide of interest levels (i.e., serum levels) are about or at least about 0.5, about or at least about 1, about or at least about 2, about or at least about 3, about or at least about 4, about or at least about 5, about or at least about 6, about or at least about 7, about or at least about 8, about or at least about 9, or about or at least about 10 μg/mL. In some methods, polypeptide of interest levels are at least about 1 μg/mL or about 1 μg/mL. In some methods, polypeptide of interest levels are at least about 2 μg/mL or about 2 μg/mL. In some methods, polypeptide of interest levels are at least about 5 μg/mL or about 5 μg/mL. In some methods, polypeptide of interest levels are about 1 μg/mL to about 30 μg/mL, about 2 μg/mL to about 30 μg/mL, about 3 μg/mL to about 30 μg/mL, about 4 μg/mL to about 30 μg/mL, about 5 μg/mL to about 30 μg/mL, about 1 μg/mL to about 20 μg/mL, about 2 μg/mL to about 20 μg/mL, about 3 μg/mL to about 20 μg/mL, about 4 μg/mL to about 20 μg/mL, about 5 μg/mL to about 20 μg/mL. For example, the method can result in polypeptide of interest levels of about 2 μg/mL to about 30 μg/mL or 2 μg/mL to about 20 μg/mL. For example, the method can result in polypeptide of interest levels of about 5 μg/mL to about 30 μg/mL or 5 μg/mL to about 20 μg/mL. In some embodiments, the recited expression levels are at least 1 month after administration. In some embodiments, the recited expression levels are at least 2 months after administration. In some embodiments, the recited expression levels are at least 3 months after administration. In some embodiments, the recited expression levels are at least 4 months after administration. In some embodiments, the recited expression levels are at least 5 months after administration. In some embodiments, the recited expression levels are at least 6 months after administration. In some embodiments, the recited expression levels are at least 9 months after administration. In some embodiments, the recited expression levels are at least 12 months after administration.

[1032] In some methods, the method increases expression and/or activity of polypeptide of interest over the subject's baseline expression and/or activity (i.e., expression and/or activity prior to administration). In some methods, the method increases expression and/or activity of polypeptide of interest over the subject's baseline expression and/or activity (i.e., expression and/or activity prior to administration. In some methods, polypeptide of interest activity and/or polypeptide of interest expression or serum levels in a subject are increased by about or at least about 10%, about or at least about 25%, about or at least about 50%, about or at least about 75%, or about or at least about 100%, or more, as compared to the subject's polypeptide of interest expression or serum levels and/or activity before administration (i.e., the subject's baseline levels). In certain embodiments, the loss of function is nearly complete such that a relative activity cannot be determined. In certain embodiments, the level of expression is sufficient to treat at least one sign or symptom resulting from the loss of function of the polypeptide of interest.

[1033] In some methods, the method increases expression and/or activity of the polypeptide of interest over the cell's baseline expression and/or activity (i.e., expression and/or activity prior to administration). In some methods, the method increases expression and/or activity of polypeptide of interest over the cell's baseline expression and/or activity (i.e., expression and/or activity prior to administration. In some methods, polypeptide of interest activity and/or expression levels in a cell or population of cells (e.g., liver cells, or hepatocytes) are increased by about or at least about 10%, about or at least about 25%, about or at least about 50%, about or at least about 75%, about or at least about 100%, or more, as compared to the polypeptide of interest activity and/or expression levels before administration (i.e., the subject's baseline levels). In certain embodiments, the polypeptide of interest loss of function is nearly complete such that a relative activity cannot be determined. In certain embodiments, the level of expression is sufficient to treat at least one sign or symptom resulting from the loss of function of the polypeptide of interest.

[1034] In a specific example, the polypeptide of interest activity levels in a subject are increased to no more than about 300%, no more than about 250%, no more than about 200%, or no more than about 150% of normal polypeptide of interest activity levels.

[1035] In a specific example, the polypeptide of interest activity levels in the subject are increased to at least about 1%, at least about 5%, at least about 10%, at least about 15%, at least about 20%, at least about 25%, at least about 30%, at least about 35%, at least about 40%, at least about 45%, at least about 50%, at least about 55%, at least about 60%, at least about 65%, at least about 70%, at least about 75%, at least about 80%, at least about 85%, at least about 90%, or at least about 100% of normal polypeptide of interest activity levels. In a specific example, the polypeptide of interest activity levels in the subject are increased to at least about 40%, at least about 45%, at least about 50%, at least about 55%, at least about 60%, at least about 65%, at least about 70%, at least about 75%, at least about 80%, at least about 85%, at least about 90%, or at least about 100% of normal polypeptide of interest activity levels.

[1036] In some methods, the method results in increased expression of the polypeptide of interest in the subject (e.g., neonatal subject) compared to a method comprising administering an episomal expression vector encoding the polypeptide of interest in a control subject. In some methods, the method results in increased serum levels of the polypeptide of interest in the subject (e.g., neonatal subject) compared to a method comprising administering an episomal expression vector encoding the polypeptide of interest to a control subject.

[1037] In some methods, the method increases expression or activity of the polypeptide of interest over the subject's (e.g., neonatal subject's) baseline expression or activity of the polypeptide of interest (i.e., any percent change in expression that is larger than typical error bars). In some methods, the method results in expression of the polypeptide of interest at a detectable level above zero, e.g., at a statistically significant level, a clinically relevant level.

[1038] Some methods comprise achieving a durable or sustained effect in a human, such as an at least at least 8 weeks, at least 24 weeks, for example, at least 1 year, or optionally at least 2 year effect, and in some embodiments, at least 3 year, at least 4 year, or at least 5 year effect. Some methods comprise achieving the therapeutic effect in a human in a durable and sustained manner, such as an at least 8 weeks, at least 24 weeks, for example, at least 1 year, or optionally at least 2 year effect, and in some embodiments, at least 3 year, at least 4 year, or at least 5 year effect. In some methods, the increased polypeptide of interest activity and/or expression level in a human is stable for at least at least 8 weeks, at least 24 weeks, for example, at least 1 year, optionally at least 2 years, and in some embodiments, at least 3 years, at least 4 years, or at least 5 years. In some methods, a steady-state activity and/or level of polypeptide of interest in a human is achieved by at least 7 days, at least 14 days, or at least 28 days, optionally at least 56 days, at least 80 days, or at least 96 days. In additional methods, the method comprises maintaining polypeptide of interest activity and/or levels after a single dose in a human for at least 8 weeks, at least 16 weeks, or at least 24 week, or in some embodiments at least 1 year, or at least 2 years, optionally at least 3 years, at least 4 years, or at least 5 years. For example, expression of the polypeptide of interest can be sustained in the human subject for at least about 8 weeks, at least about 12 weeks, at least about 24 weeks, in certain embodiments, at least about 1 year, or at least about 2 years after treatment, and in some embodiments, at least 3 years, at least 4 years, or at least 5 years after treatment. Likewise, activity of the polypeptide of interest can be sustained in the human subject for at least about 8 weeks, at least about 12 weeks, at least about 24 weeks, in certain embodiments for at least about 1 year, or at least about 2 years after treatment, and in some embodiments, at least 3 years, at least 4 years, or at least 5 years after treatment. In some methods, expression or activity of the polypeptide of interest is maintained at a level higher than the expression or activity of the polypeptide of interest prior to treatment (i.e., the subject's baseline). In some methods, expression or activity of the polypeptide of interest is considered sustained if it is maintained at a therapeutically effective level of expression or activity. Relative durations, in other organisms, are understood based, e.g., on life span and developmental stages, are covered within the disclosure above. In some methods, expression or activity of the polypeptide of interest is considered “sustained” if the expression or activity in a human at six months after administration, one year after administration, or two years after administration, the expression or activity is at least 50% of the expression or activity of the peak level of expression or activity measured for that subject. In certain embodiments, at six months, e.g., at 24 weeks to 28 weeks, after administration the expression or activity is at least 50%, 55%, 60%, 65%, 70%, 75% or 80% of the expression or activity of the peak level of expression or activity measured for that subject. In certain embodiments, at one year, i.e., about 12 months, e.g., at 11-13 months, after administration the expression or activity is at least 50%, 55%, 60%, 65%, 70%, 75% or 80% of the expression or activity of the peak level of expression or activity measured for that subject. In certain embodiments, at two years, i.e., about 24 months, e.g., at 23-25 months, after administration the expression or activity is at least 50%, 55%, 60%, 65%, 70%, 75% or 80% of the expression or activity of the peak level of expression or activity measured for that subject. In certain embodiments, at six months after administration the expression or activity is at least 50%, preferably at least 60% of the expression or activity of the peak level of expression or activity measured for that subject. In certain embodiments, at one year after administration the expression or activity is at least 50%, preferably at least 60% of the expression or activity of the peak level of expression or activity measured for that subject. In certain embodiments, at two years after administration the expression or activity is at least 50%, preferably at least 60% of the expression or activity of the peak level of expression or activity measured for that subject. In preferred embodiments, the subject has routine monitoring of expression or activity levels of the polypeptide, e.g., weekly, monthly, particularly early after administration, e.g., within the first six months. Periodic measurements may establish that the effect on expression or activity is sustained at, e.g., 6 months after administration, one year after administration, or two years after administration. In some methods in neonatal subjects, the expression of the polypeptide of interest is sustained when the neonatal subject becomes an adult. In some methods, the expression of the polypeptide of interest is sustained for the lifetime of the subject or neonatal subject.

[1039] In some methods, the expression or activity of the polypeptide of interest is at least 50% of the expression or activity of the polypeptide of interest at a peak level of expression measured for the subject at 24 weeks after the administering. In some methods, the expression or activity of the polypeptide of interest is at least 50% of the expression or activity of the polypeptide of interest at a peak level of expression measured for the subject at one year after the administering. In some methods, the expression or activity of the polypeptide of interest is at least 60% of the expression or activity of the polypeptide of interest at a peak level of expression measured for the subject at 24 weeks after the administering. In some methods, the expression or activity of the polypeptide of interest is at least 50% of the expression or activity of the polypeptide of interest at a peak level of expression measured for the subject at two years after the administering. In some methods, the expression or activity of the polypeptide of interest is at least 60% of the expression or activity of the polypeptide of interest at a peak level of expression measured for the subject at 2 years after the administering. In some methods, the expression or activity of the polypeptide of interest is at least 60% of the expression or activity of the polypeptide of interest at a peak level of expression measured for the subject at 24 weeks after the administering.

[1040] In some methods involving insertion into an ALB locus, the subject's circulating albumin levels or cell's albumin levels are normal. Such methods may comprise maintaining the subject's circulating albumin levels or the cell's albumin levels within ±5%, ±10%, ±15%, ±20%, or ±50% of normal circulating albumin levels or normal albumin levels. In some methods, the subject's or cell's albumin levels are unchanged as compared to the albumin levels of untreated individuals by at least week 4, at least week 8, at least week 12, or at least week 20. In some methods, the subject's or cell's albumin levels transiently drop and then return to normal levels. In particular, the methods may comprise detecting no significant alterations in levels of plasma albumin.

[1041] In some methods, the method further comprises determining whether the subject has immunity against the nucleic acid construct, the polypeptide of interest, the nuclease agent, the one or more nucleic acids encoding the nuclease agent, or the delivery vehicle for the nucleic acid construct, the nuclease agent, or the one or more nucleic acids encoding the nuclease agent prior to the administering of any of the above. For example, the determining can comprise determining the presence of neutralizing antibodies against the nucleic acid construct, the polypeptide of interest, the nuclease agent, the one or more nucleic acids encoding the nuclease agent, or the delivery vehicle for the nucleic acid construct, the nuclease agent, or the one or more nucleic acids encoding the nuclease agent (e.g., determining the presence of neutralizing antibodies against an AAV comprising a nucleic acid construct). For example, the determining the presence of neutralizing antibodies can comprise determining whether there is an effective level of neutralizing antibody to prevent the intended outcome of insertion of a nucleic acid construct into a genomic locus or expression of the polypeptide of interest encoded by the nucleic acid construct. In some methods, the method further comprises assessing preexisting anti-polypeptide of interest immunity in a subject prior to administering any of the nucleic acid constructs described herein. For example, such methods could comprise assessing immunogenicity using a total antibody (TAb) immune assay or a neutralizing antibody (NAb) assay. In some methods, the subject has not previously been administered recombinant polypeptide of interest protein. In some methods, the subject has previously been administered recombinant polypeptide of interest protein.

[1042] In some methods, the method further comprises assessing preexisting anti-AAV (e.g., anti-AAV8) immunity in a subject prior to administering any of the nucleic acid constructs described herein. For example, such methods could comprise assessing immunogenicity using a total antibody (TAb) immune assay or a neutralizing antibody (NAb) assay. See, e.g., Manno et al. (2006) Nat. Med. 12(3):342-347, Kruzik et al. (2019) Mol. Ther. Methods Clin. Dev. 14:126-133, and Weber (2021) Front. Immunol. 12:658399, each of which is herein incorporated by reference in its entirety for all purposes. In some embodiments, TAb assays look for antibodies that bind to the AAV vector, whereas NAb assays assess whether the antibodies that are present stop the AAV vector from transducing target cells. With TAb assays, the drug product or an empty capsid can be used to capture the antibodies; NAb assays can require a reporter vector (e.g., a version of the AAV vector encoding luciferase). In some embodiments, the subject does not have preexisting anti-AAV immunity. In some embodiments, the subject does have preexisting AAV immunity.

[1043] In various aspects, the present disclosure provides methods for inhibiting or preventing an immune response to an immunogen (e.g., an immunogenic delivery vehicle such as, e.g., AAV) in a subject in need thereof, the methods comprising administering to the subject an effective amount of a plasma cell depleting agent, a B cell depleting agent, and/or an immunoglobulin depleting agent disclosed herein. In some embodiments, the present disclosure provides methods for inhibiting or preventing generation of antibodies (e.g., neutralizing antibodies) to an immunogen in a subject in need thereof, the methods comprising administering to the subject an effective amount of a plasma cell depleting agent, a B cell depleting agent, and/or an immunoglobulin depleting agent. In some embodiments of methods of the disclosure comprising administering to the subject an effective amount of a plasma cell depleting agent and an immunogen (e.g., a nucleic acid construct described herein, a polypeptide of interest encoded by a nucleic acid construct described herein, a nuclease agent or one or more nucleic acids encoding the nuclease agent as described herein, or a delivery vehicle for the nucleic acid construct, the nuclease agent, or the one or more nucleic acids encoding the nuclease agent as described herein, such as AAV), the subject has a pre-existing immunity against the immunogen (e.g., AAV). In another aspect, provided herein is a method for inhibiting generation of neutralizing antibodies to an immunogen in a subject in need thereof (e.g., a subject without a pre-existing immunity against the immunogen), the method comprising administering to the subject an effective amount of an anti-CD20×CD3 bispecific antibody or functional fragment thereof. In some embodiments, the present disclosure provides methods for increasing effectiveness of re-administration of an immunogen to a subject in need thereof, the methods comprising administering to the subject an effective amount of a plasma cell depleting agent, a B cell depleting agent, and/or an immunoglobulin depleting agent. In another aspect, provided herein is a method for increasing effectiveness of re-administration of an immunogen to a subject in need thereof (e.g., a subject without a pre-existing immunity against the immunogen), the method comprising administering to the subject an effective amount of an anti-CD20×CD3 bispecific antibody or functional fragment thereof. The term “re-administering” is used synonymously and interchangeably with the term “re-dosing” herein. In some embodiments, the present disclosure provides methods for increasing or maintaining the level of a transgene expression in a subject in need thereof, and the transgene is delivered to the subject via an immunogenic delivery vehicle (e.g., an AAV), the methods comprising administering to the subject an effective amount of a plasma cell depleting agent, a B cell depleting agent, and/or an immunoglobulin depleting agent.

[1044] In some embodiments, a plasma cell depleting agent, a B cell depleting agent, and/or an immunoglobulin depleting agent which can be useful in any of the methods or compositions disclosed herein may be further used in combination with a plasmapheresis, therapeutic plasma exchange, and/or immunoadsorption.

[1045] In some embodiments, administration of a plasma cell depleting agent, a B cell depleting agent, an immunoglobulin depleting agent, and/or an immunogen prevents or delays the increase of disease symptoms or the progression of disease in a subject having disease or condition.

[1046] In some embodiments, a plasma cell depleting agent, a B cell depleting agent, and/or an immunoglobulin depleting agent may inhibit an immune response by a cell (e.g., an immune cell such as by a B cell or a T cell) or by an immune system of a subject (e.g., a human) which can be elicited by an immunogen.

[1047] In some embodiments, a plasma cell depleting agent, a B cell depleting agent, and/or an immunoglobulin depleting agent may inhibit an immune response by a cell (e.g., an immune cell such as a B cell or a T cell) or by an immune system of a subject (e.g., a human) which can be elicited by an immunogenic delivery vehicle.

[1048] In one aspect, the present disclosure provides a method for increasing or maintaining the level of AAV transduction in a target cell and/or tissue, e.g., a target cell and/or tissue within or derived from a subject in need thereof, the method comprising contacting the target cell and/or tissue with, and/or administering to the subject, an effective amount of a plasma cell depleting agent, a B cell depleting agent, and/or an immunoglobulin depleting agent.

[1049] In another aspect, provided herein is a method for increasing or maintaining the level of AAV transduction in a target cell and/or tissue, e.g., a target cell and/or tissue within or derived from a subject in need thereof (e.g., a subject without pre-existing immunity against AAV), the method comprising contacting the target cell and/or tissue with, and/or administering to the subject, an effective amount of an anti-CD20×CD3 bispecific antibody or a functional fragment thereof. In some embodiments, the level of AAV transduction in the target cell and/or tissue is increased or maintained by inhibiting or preventing an immune response to the AAV in the subject. In some embodiments, the level of AAV transduction is increased or maintained in the target cell and/or tissue by inhibiting antibody responses to the AAV in the subject.

[1050] In some embodiments, the level of AAV transduction in the target cell and/or tissue is increased or maintained by inhibiting or preventing an immune response to the AAV in a subject. As a non-limiting example, the level of AAV transduction in the target cell and/or tissue may be increased by about 1%, about 2%, about 3%, about 4%, about 5%, about 7% about 8%, about 9%, about 10%, from about 10% to about 15%, from about 15% to about 20%, from about 20% to about 25%, from about 25% to about 30%, from about 30% to about 40%, from about 40% to about 50% or more. The level of AAV transduction may be increased in the target cell and/or tissue by from about 50% to about 60%, from about 50% to about 70%, from about 50% to about 80%, from about 50% to about 90%, more than 60%, from about 60% to about 70%, from about 60% to about 80%, from about 60% to about 90%, more than about 70%, from about 70% to about 80%, from about 70% to about 90%, more than about 80%, from about 80% to about 90%, more than 90%, from about 90% to about 95%, from about 90% to about 98%, more than 95%, from about 95% to about 98%, more than about 98%, or more than about 99%. The level AAV transduction may be increased in the target cell and/or tissue by about 50%, about 55%, about 60%, about 65%, about 70%, about 75%, about 80%, about 85%, about 90%, about 91%, about 92%, about 93%, about 94%, about 95%, about 96%, about 97%, about 98%, about 99% or even 100%. In some embodiments, the level of AAV transduction in the target cell and/or tissue is maintained by inhibiting or preventing an immune response to the AAV in the subject.

[1051] In some embodiments, the level of AAV transduction in the target cell and/or tissue is increased or maintained by inhibiting antibody responses to the AAV in a subject. As a non-limiting example, the level of AAV transduction in the target cell and/or tissue may be increased by about 1%, about 2%, about 3%, about 4%, about 5%, about 7% about 8%, about 9%, about 10%, from about 10% to about 15%, from about 15% to about 20%, from about 20% to about 25%, from about 25% to about 30%, from about 30% to about 40%, from about 40% to about 50% or more. The level of AAV transduction may be increased in the target cell and/or tissue by from about 50% to about 60%, from about 50% to about 70%, from about 50% to about 80%, from about 50% to about 90%, more than 60%, from about 60% to about 70%, from about 60% to about 80%, from about 60% to about 90%, more than about 70%, from about 70% to about 80%, from about 70% to about 90%, more than about 80%, from about 80% to about 90%, more than 90%, from about 90% to about 95%, from about 90% to about 98%, more than 95%, from about 95% to about 98%, more than about 98%, or more than about 99%. The level AAV transduction may be increased in the target cell and/or tissue by about 50%, about 55%, about 60%, about 65%, about 70%, about 75%, about 80%, about 85%, about 90%, about 91%, about 92%, about 93%, about 94%, about 95%, about 96%, about 97%, about 98%, about 99% or even 100%. In some embodiments, the level of AAV transduction in the target cell and/or tissue is maintained by inhibiting antibody responses to the AAV in the subject.

[1052] In one aspect, the present disclosure provides a method for increasing or maintaining the level of expression of a polypeptide of interest (e.g., expressed from an administered nucleic acid construct as described elsewhere herein) in a subject in need thereof, the method comprising administering to the subject an effective amount of a plasma cell depleting agent, a B cell depleting agent, and/or an immunoglobulin depleting agent. In some embodiments, the nucleic acid construct is delivered to the subject via an immunogenic delivery vehicle (e.g., AAV). In another aspect, provided herein is a method for increasing or maintaining the level of expression of a polypeptide of interest (e.g., expressed from an administered nucleic acid construct as described elsewhere herein) in a subject in need thereof, the method comprising administering to the subject an effective amount of an anti-CD20×CD3 bispecific antibody or a functional fragment thereof. In some embodiments, the nucleic acid construct is delivered to the subject via an immunogenic delivery vehicle (e.g., AAV). In some embodiments, the subject does not have a pre-existing immunity against the immunogenic delivery vehicle and/or transgene product(s) (e.g., does not have pre-existing immunity against a nucleic acid construct described herein, a polypeptide of interest encoded by a nucleic acid construct described herein, a nuclease agent or one or more nucleic acids encoding the nuclease agent as described herein, or a delivery vehicle for the nucleic acid construct, the nuclease agent, or the one or more nucleic acids encoding the nuclease agent as described herein, such as AAV).

[1053] In some embodiments, the level of expression of a polypeptide of interest is increased or maintained by inhibiting an immune response to the immunogenic delivery vehicle and/or by inhibiting an immune response to a polypeptide or polynucleotide encoded by the nucleic acid construct. In some embodiments, the level of expression of a polypeptide of interest is increased or maintained by inhibiting antibody responses to the polypeptide or polynucleotide encoded by the nucleic acid construct.

[1054] In some embodiments, the level of expression of a polypeptide of interest is increased or maintained by inhibiting an immune response to the immunogenic delivery vehicle and/or by inhibiting an immune response to the transgene product(s). In some embodiments, the level of expression of a polypeptide of interest is increased or maintained by inhibiting antibody responses to the transgene product(s).

[1055] In some embodiments, the level of expression of the polypeptide of interest is increased or maintained by inhibiting or preventing an immune response to the immunogenic delivery vehicle and/or by inhibiting or preventing an immune response to one or more other delivered components (e.g., nucleic acid construct, nuclease agent or CRISPR/Cas system). As a non-limiting example, the level of expression of the polypeptide of interest may be increased by about 1%, about 2%, about 3%, about 4%, about 5%, about 7% about 8%, about 9%, about 10%, from about 10% to about 15%, from about 15% to about 20%, from about 20% to about 25%, from about 25% to about 30%, from about 30% to about 40%, from about 40% to about 50% or more. The level of expression of the polypeptide of interest may be increased by from about 50% to about 60%, from about 50% to about 70%, from about 50% to about 80%, from about 50% to about 90%, more than 60%, from about 60% to about 70%, from about 60% to about 80%, from about 60% to about 90%, more than about 70%, from about 70% to about 80%, from about 70% to about 90%, more than about 80%, from about 80% to about 90%, more than 90%, from about 90% to about 95%, from about 90% to about 98%, more than 95%, from about 95% to about 98%, more than about 98%, or more than about 99%. The level of expression of the polypeptide of interest may be increased by about 50%, about 55%, about 60%, about 65%, about 70%, about 75%, about 80%, about 85%, about 90%, about 91%, about 92%, about 93%, about 94%, about 95%, about 96%, about 97%, about 98%, about 99% or even 100%.

[1056] In some embodiments, the immune response to the immunogenic delivery vehicle and/or the immune response to one or more other delivered components (e.g., nucleic acid construct, nuclease agent or CRISPR/Cas system) may be inhibited by about 1%, about 2%, about 3%, about 4%, about 5%, about 7% about 8%, about 9%, about 10%, from about 10% to about 15%, from about 15% to about 20%, from about 20% to about 25%, from about 25% to about 30%, from about 30% to about 40%, from about 40% to about 50% or more. The immune response to the immunogenic delivery vehicle and/or the immune response to one or more other delivered components may be inhibited by from about 50% to about 60%, from about 50% to about 70%, from about 50% to about 80%, from about 50% to about 90%, more than 60%, from about 60% to about 70%, from about 60% to about 80%, from about 60% to about 90%, more than about 70%, from about 70% to about 80%, from about 70% to about 90%, more than about 80%, from about 80% to about 90%, more than 90%, from about 90% to about 95%, from about 90% to about 98%, more than 95%, from about 95% to about 98%, more than about 98%, or more than about 99%. The immune response to the immunogenic delivery vehicle and/or the immune response to one or more other delivered components may be inhibited by about 50%, about 55%, about 60%, about 65%, about 70%, about 75%, about 80%, about 85%, about 90%, about 91%, about 92%, about 93%, about 94%, about 95%, about 96%, about 97%, about 98%, about 99% or even 100%.

[1057] In another aspect, provided herein is a method for inhibiting or preventing an immune response to an immunogen in a subject in need thereof (e.g., a subject without a pre-existing immunity against the immunogen, such as a nucleic acid construct described herein, a polypeptide of interest encoded by a nucleic acid construct described herein, a nuclease agent or one or more nucleic acids encoding the nuclease agent as described herein, or a delivery vehicle for the nucleic acid construct, the nuclease agent, or the one or more nucleic acids encoding the nuclease agent as described herein, such as AAV), the method comprising administering to the subject an effective amount of an anti-CD20×CD3 bispecific antibody or a functional fragment thereof.

[1058] In some embodiments, inhibiting or preventing the immune response comprises suppression of numbers and frequencies of immunogen-specific B cells.

[1059] In some embodiments of the methods for inhibiting or preventing an immune response to an immunogen described herein, the inhibiting of the immune response can comprise suppression of numbers and/or frequencies of plasma cells and/or B cells.

[1060] In some embodiments, the number and/or frequency of plasma cells and/or B cells may be reduced by about 1%, about 2%, about 3%, about 4%, about 5%, about 7% about 8%, about 9%, about 10%, from about 10% to about 15%, from about 15% to about 20%, from about 20% to about 25%, from about 25% to about 30%, from about 30% to about 40%, from about 40% to about 50% or more. The number and/or frequency of plasma cells and/or B cells may be reduced by from about 50% to about 60%, from about 50% to about 70%, from about 50% to about 80%, from about 50% to about 90%, more than 60%, from about 60% to about 70%, from about 60% to about 80%, from about 60% to about 90%, more than about 70%, from about 70% to about 80%, from about 70% to about 90%, more than about 80%, from about 80% to about 90%, more than 90%, from about 90% to about 95%, from about 90% to about 98%, more than 95%, from about 95% to about 98%, more than about 98%, or more than about 99%. The number and/or frequency of plasma cells and/or B cells may be reduced by about 50%, about 55%, about 60%, about 65%, about 70%, about 75%, about 80%, about 85%, about 90%, about 91%, about 92%, about 93%, about 94%, about 95%, about 96%, about 97%, about 98%, about 99% or even 100%.

[1061] In some embodiments, the total number and/or frequency of plasma cells and/or B cells may be reduced by about 1%, about 2%, about 3%, about 4%, about 5%, about 7% about 8%, about 9%, about 10%, from about 10% to about 15%, from about 15% to about 20%, from about 20% to about 25%, from about 25% to about 30%, from about 30% to about 40%, from about 40% to about 50% or more. The total number and/or frequency of plasma cells and/or B cells may be reduced by from about 50% to about 60%, from about 50% to about 70%, from about 50% to about 80%, from about 50% to about 90%, more than 60%, from about 60% to about 70%, from about 60% to about 80%, from about 60% to about 90%, more than about 70%, from about 70% to about 80%, from about 70% to about 90%, more than about 80%, from about 80% to about 90%, more than 90%, from about 90% to about 95%, from about 90% to about 98%, more than 95%, from about 95% to about 98%, more than about 98%, or more than about 99%. The total number and/or frequency of plasma cells and/or B cells may be reduced by about 50%, about 55%, about 60%, about 65%, about 70%, about 75%, about 80%, about 85%, about 90%, about 91%, about 92%, about 93%, about 94%, about 95%, about 96%, about 97%, about 98%, about 99% or even 100%.

[1062] In some embodiments, inhibiting the immune response comprises suppression of immunogen-specific IgG and/or IgM responses.

[1063] In some embodiments, the responses of IgG and/or IgM may be reduced by about 1%, about 2%, about 3%, about 4%, about 5%, about 7% about 8%, about 9%, about 10%, from about 10% to about 15%, from about 15% to about 20%, from about 20% to about 25%, from about 25% to about 30%, from about 30% to about 40%, from about 40% to about 50% or more. The responses of IgG may be reduced by from about 50% to about 60%, from about 50% to about 70%, from about 50% to about 80%, from about 50% to about 90%, more than 60%, from about 60% to about 70%, from about 60% to about 80%, from about 60% to about 90%, more than about 70%, from about 70% to about 80%, from about 70% to about 90%, more than about 80%, from about 80% to about 90%, more than 90%, from about 90% to about 95%, from about 90% to about 98%, more than 95%, from about 95% to about 98%, more than about 98%, or more than about 99%. The responses of IgG may be reduced by about 50%, about 55%, about 60%, about 65%, about 70%, about 75%, about 80%, about 85%, about 90%, about 91%, about 92%, about 93%, about 94%, about 95%, about 96%, about 97%, about 98%, about 99% or even 100%.

[1064] In some embodiments, the effectiveness of re-administration of an immunogen may be increased by about 1%, about 2%, about 3%, about 4%, about 5%, about 6%, about 7% about 8%, about 9%, about 10%, from about 10% to about 15%, from about 15% to about 20%, from about 20% to about 25%, from about 25% to about 30%, from about 30% to about 40%, from about 40% to about 50% or more. The effectiveness of re-administration of an immunogen be increased by from about 50% to about 60%, from about 50% to about 70%, from about 50% to about 80%, from about 50% to about 90%, more than 60%, from about 60% to about 70%, from about 60% to about 80%, from about 60% to about 90%, more than about 70%, from about 70% to about 80%, from about 70% to about 90%, more than about 80%, from about 80% to about 90%, more than 90%, from about 90% to about 95%, from about 90% to about 98%, more than 95%, from about 95% to about 98%, more than about 98%, or more than about 99%. The effectiveness of re-administration of an immunogen may be increased by about 50%, about 55%, about 60%, about 65%, about 70%, about 75%, about 80%, about 85%, about 90%, about 91%, about 92%, about 93%, about 94%, about 95%, about 96%, about 97%, about 98%, about 99% or even 100%.

### A. Hemophilia B

[1065] In some methods disclosed herein, the polypeptide of interest is a Factor IX (FIX) protein disclosed herein, and the enzyme deficiency is FIX deficiency or hemophilia B. See, e.g., WO 2023/077012 and US 2023-0149563, each of which is herein incorporated by reference in its entirety for all purposes. In such methods, the nucleic acid constructs and compositions disclosed herein can be used in methods of introducing a nucleic acid construct encoding a polypeptide of interest in a cell or population of cells in a subject, methods of inserting or integrating a nucleic acid construct encoding a polypeptide of interest into a target genomic locus in a cell or population of cells in a subject, methods of expressing a polypeptide of interest (e.g., from a target genomic locus) in a cell or population of cells in a subject, methods of reducing glycogen accumulation in a cell or a population of cells or a tissue in a subject, methods of treating hemophilia B disease or FIX deficiency in a subject, and methods or preventing or reducing the onset of a sign or symptom of hemophilia B or FIX deficiency in a subject.

[1066] The compositions disclosed herein (e.g., F9 nucleic acid constructs, or F9 nucleic acid constructs in combination with plasma cell depleting agents or combinations comprising plasma cell depleting agents and the nuclease agents (e.g., CRISPR/Cas systems)) are useful for the treatment of FIX deficiency or hemophilia B and/or ameliorating at least one symptom associated with FIX deficiency or hemophilia B. Likewise, the compositions disclosed herein can be used for the preparation of a pharmaceutical composition or medicament for treating a subject having FIX deficiency or hemophilia B.

[1067] The compositions disclosed herein (e.g., F9 nucleic acid constructs, or F9 nucleic acid constructs in combination with B cell depleting agents (e.g., anti-CD20×CD3 antigen-binding molecules) and the nuclease agents (e.g., CRISPR/Cas systems)) are useful for the treatment of FIX deficiency or hemophilia B and/or ameliorating at least one symptom associated with FIX deficiency or hemophilia B. Likewise, the compositions disclosed herein can be used for the preparation of a pharmaceutical composition or medicament for treating a subject having FIX deficiency or hemophilia B.

[1068] Symptoms and Cause. Hemostasis is a balance between procoagulant and anticoagulant activity to maintain blood in a fluid state under normal conditions and rapidly form a blood clot in the case of a vessel injury. Coagulation is initiated by disruption of the endothelium exposing platelets to collagen and extravascular tissue factor. This results in an activation cascade of clotting factors, including FIX, amplifying the coagulation reaction until activation and polymerization of fibrin monomers form a plug to block blood flow and achieve hemostasis. The coagulation process is accompanied by clot containment, wound healing, clot dissolution, tissue regeneration and remodeling.

[1069] Hemophilia B is a rare congenital disorder caused by an inherited or spontaneous recessive mutation in the F9 gene present on the X chromosome, leading to the expression of a malfunctioning or deficient FIX protein. The absence of a functioning FIX protein interrupts the coagulation cascade and greatly limits the normal formation of blood clots, leading to abnormal bleeding. Due to the recessive nature of the variant, hemophilia usually only affects men, although female carriers may experience mild to moderate symptoms and may require treatment.

[1070] Hemophilia is usually inherited from the maternal X chromosome, but prospective studies report that 43% of people newly diagnosed with severe hemophilia B have no prior family history of hemophilia. See, e.g., Srivastava et al. (2020) Haemophilia 26.6:1-158 and Kasper et al. (2007) Haemophilia 13:90-92, each of which is herein incorporated by reference in its entirety for all purposes. The report on the Annual Global Survey conducted in 2019 by the World Federation of Hemophilia reported that 31,997 patients lived with Hemophilia B in the world, with 4,093 patients living in the U.S. See, e.g., World Federation of Hemophilia, “Report on the Annual Global Survey 2019” World Federation of Hemophilia (2020), herein incorporated by reference in its entirety for all purposes. The estimated incidence (prevalence at birth) of hemophilia B worldwide is 5.0 cases per 100,000 males, and 1.5 cases per 100,000 males for severe hemophilia B. Due to the higher mortality rate for people with hemophilia, the estimated prevalence across age groups is lower, with 3.8 cases of hemophilia B per 100,000 males, including 1.1 cases of severe hemophilia per 100,000 males. See, e.g., World Federation of Hemophilia, “Report on the Annual Global Survey 2019” World Federation of Hemophilia (2020), herein incorporated by reference in its entirety for all purposes.

[1071] The severity of hemophilia and bleeding manifestations correlates with the degree of clotting factor's activity levels (Table 11). See, e.g., Srivastava et al. (2020) Haemophilia 26.6:1-158, herein incorporated by reference in its entirety for all purposes. In high-income markets, it is estimated that 34% of hemophilia B patients have mild hemophilia, around 31% have a moderate hemophilia, and 33% have a severe hemophilia. See, e.g., World Federation of Hemophilia, “Report on the Annual Global Survey 2019” World Federation of Hemophilia (2020), herein incorporated by reference in its entirety for all purposes.

TABLE 11
Severity Classification of Hemophilia B Based on Clotting Factor Activity Level.

| Severity | FIX Activity Levels | Clinical Symptoms |
|---|---|---|
| Mild | 6-49% of normal, | Typically experience bleeding only after serious injury, trauma, or surgery |
| | 0.06-0.40 IU/mL | May not be diagnosed until well into adulthood. |
| | | Spontaneous bleeding rare, but may occur in patients with less than ~15- |
| | | 30% of normal FIX activity levels. |
| Moderate | 1-5% of normal, | Bleed infrequently, and experience prolonged bleeding following minor |
| | 0.01-0.05 IU/mL | surgery or injury. |
| | | Spontaneous bleeds may occur, generally <1 times per month. |
| Severe | <1% of normal, <0.01 | Experience bleeding after injury and may have frequent spontaneous |
| | IU/mL | bleeds several times per month, including in their joints and muscles. |

[1072] Clinical symptoms of hemophilia B include the observation of easy bruising, “spontaneous” bleeding in the joints, muscles and soft tissues, pain, excessive bleeding following trauma or surgery, and life-threatening intracranial bleeding.

[1073] Spontaneous bleeding most commonly occurs in the joints, with the knees (>50% of all bleeding events), elbows, ankles, shoulders, and wrists the most affected. The recurrence of the bleeds in the joints results in inflammation with swelling of the joint, degeneration of the cartilage and progressive destruction of the joint space called hemophilic arthropathy. As the arthropathy develops in a joint, bleedings become more and more frequent even when minimal joint stress is applied such as normal weight bearing, leading to chronic synovitis, pain, fibrosis and progressive joint stiffness. In the last phase of the hemophilic arthropathy, progressive and erosive destruction of the cartilage narrows the joint space leading to collapse or sclerosis of the joint.

[1074] Intramuscular hemorrhages represent 30% of bleeding events. When localized in confined spaces like fascial muscles, it may lead to significant compression of vital structures with ischemia, gangrene, contractures and neuropathy. Bleeding in the pelvic space might lead to femoral nerve compression leading to potential permanent disability if neuropathy develops. See, e.g., Napolitano et al., “Chapter 3—Hemophilia A and Hemophilia B,” Consultative Hemostasis and Thrombosis, Elsevier 4(2019):39-58, herein incorporated by reference in its entirety for all purposes.

[1075] Epistaxis, oral and gastrointestinal bleeding can also occur following minor trauma like coughing or vomiting. Bleedings in the abdominal wall or in the bowel wall can also occur producing severe pain often misdiagnosed for appendicitis for example. See, e.g., Hoots et al., “Clinical manifestations and diagnosis of hemophilia” UptoDate (2019), herein incorporated by reference in its entirety for all purposes. Hematuria is a frequent manifestation of severe hemophilia but is usually benign and not associated with progressive loss of renal function. See, e.g., Hoots et al., “Clinical manifestations and diagnosis of hemophilia” UptoDate (2019), herein incorporated by reference in its entirety for all purposes.

[1076] Intracranial hemorrhage is estimated to occur in approximately 2.7% of individuals with hemophilia and is spontaneous in 50% of the time in affected adults. Despite its low incidence, intracranial hemorrhage is the most common cause of death from bleeding in hemophilic patients. See, e.g., Napolitano et al., “Chapter 3—Hemophilia A and Hemophilia B,” Consultative Hemostasis and Thrombosis, Elsevier 4(2019):39-58, herein incorporated by reference in its entirety for all purposes.

[1077] The overall life expectancy of patients with hemophilia B varies whether patients receive appropriate treatment. With prophylaxis and on-demand treatment such as the ones available in the U.S., the median life expectancy was found to be 6 years less than healthy men (77 years old versus 83 years old) in a study conducted in The Netherlands in 2018. See, e.g., Hassan et al. (2021) J. Thromb. Haemost. 19:645-653, herein incorporated by reference in its entirety for all purposes.

[1078] Diagnostic. Patients with severe hemophilia B are usually diagnosed before the age of 2 years based on clinical features, whilst patients with mild hemophilia might be diagnosed at an older age if the bleeding symptoms only manifest at time of injuries or surgeries. See, e.g., Berntorp et al. (2021) Nat. Rev. Dis. Primers 7.45, herein incorporated by reference in its entirety for all purposes.

[1079] The diagnosis of general hemophilia is firstly based on the clinical features and is then confirmed by screening test results with a normal platelet count, a normal prothrombin time (PT) assay but a prolonged activated partial thromboplastin time (APTT). See, e.g., Srivastava et al. (2020) Haemophilia 26.6:1-158 and Hoots et al., “Clinical manifestations and diagnosis of hemophilia” UptoDate (2019), each of which is herein incorporated by reference in its entirety for all purposes. The final diagnosis of hemophilia B is based on the results of the one-stage FIX assay measuring FIX activity levels below 40% of normal. See, e.g., Srivastava et al. (2020) Haemophilia 26.6:1-158, herein incorporated by reference in its entirety for all purposes. In rare circumstances, the FIX activity level of hemophilia B patients may be ≥40%, and a pathogenic FIX level can be investigated.

[1080] A genetic diagnosis can be performed to define the disease biology, establish the diagnosis in difficult cases, predict risk of inhibitor development, identify female carriers, and provide prenatal diagnosis if desired. See, e.g., Srivastava et al. (2020) Haemophilia 26.6:1-158, herein incorporated by reference in its entirety for all purposes. Although it is recognized that genetic testing might not always identify the exact mutation, it is estimated that mutation responsible for hemophilia B is identified in the F9 gene in 98% of cases. See, e.g., Carcao et al., “Hemophilia A and B” Hematology, Elsevier 7(2018):2001-2022, herein incorporated by reference in its entirety for all purposes. Newborns can be tested for hemophilia B through a blood test to measure factor IX levels. For example, the blood can be drawn from the umbilical cord.

[1081] Treatment and Unmet Medical Need. The main objective of hemophilia B treatment is to prevent or treat bleedings by replacing the missing blood clotting factor to hemostatically adequate plasma levels for prevention or treatment of acute bleedings. See, e.g., Napolitano et al., “Chapter 3—Hemophilia A and Hemophilia B,” Consultative Hemostasis and Thrombosis, Elsevier 4(2019):39-58, herein incorporated by reference in its entirety for all purposes.

[1082] The current standard of care is the use of plasma-derived or recombinant FIX clotting factor concentrates (CFC) for the prevention or treatment of hemophilia B. See, e.g., Srivastava et al. (2020) Haemophilia 26.6:1-158, herein incorporated by reference in its entirety for all purposes. Prophylaxis by regular administration of CFC is recommended to prevent spontaneous bleeding in patients with moderate-to-severe hemophilia B to maintain FIX levels over 1%. FIX activity levels of 30-50% of normal are required to control minor or moderate bleedings or to prevent recurrent spontaneous bleedings (Srivastava et al. (2020) Haemophilia 26.6:1-158), representing 2 to 3 intravenous infusions of standard FIX CFC per week made under the supervision of a physician specialized in hemophilia treatment. See, e.g., Srivastava et al. (2020) Haemophilia 26.6:1-158 and Powell et al. (2013) N. Engl. J. Med. 369.24:2313-2323, each of which is herein incorporated by reference in its entirety for all purposes. Extended half-life CFCs have been developed to reduce the frequency of administration to every week or every two weeks. See, e.g., Powell et al. (2013) N. Engl. J. Med. 369.24:2313-2323, each of which is herein incorporated by reference in its entirety for all purposes. Initiation of prophylaxis is recommended as early as possible, and preferably before 3 years old, since age at initiation has been demonstrated to be a strong predictor of long-term clinical outcomes. See, e.g., Srivastava et al. (2020) Haemophilia 26.6:1-158, herein incorporated by reference in its entirety for all purposes. Gene therapy for hemophilia patients during the neonatal and infant stages can prevent irreversible symptoms and life-threatening events, such as hemophilic arthropathy and intracranial bleeding.

[1083] Episodic, or on-demand therapy, can be added to the prophylaxis in case of hemorrhage or surgical procedures in which case levels of 50-100% of normal FIX activity should be achieved and maintained for a minimum of 7 to 10 days. See, e.g., Carcao et al., “Hemophilia A and B” Hematology, Elsevier 7(2018):2001-2022, and Napolitano et al., “Chapter 3—Hemophilia A and Hemophilia B,” Consultative Hemostasis and Thrombosis, Elsevier 4(2019):39-58, each of which is herein incorporated by reference in its entirety for all purposes. On-demand therapy can be the only treatment for patients with moderate forms of hemophilia B who do not experience spontaneous bleeding. See, e.g., Srivastava et al. (2020) Haemophilia 26.6:1-158, herein incorporated by reference in its entirety for all purposes.

[1084] Patients with high adherence to prophylaxis treatment have been observed to have lower levels of annualized bleeding rate (ABR). Recent studies on the efficacy of rCFCs observed that the mean ABR across studies ranged between 0-4. See, e.g., Davis et al. (2019) J. Med. Econ. 22.10:1014-1021 and Chhabra (2020) Blood Coagul. Fibrinolysis 31.3:186-192, each of which is herein incorporated by reference in its entirety for all purposes.

[1085] In addition to pharmacological treatments, a multi-disciplinary team supporting the patient's care and education relating to hemophilia will be put in place, generally consisting of at least a hematologist, a nurse, and a physical therapist.

[1086] Although the use of CFCs in the U.S. has changed the overall course of the disease, there remains an unmet medical need for hemophilia B patients. Firstly, the development of neutralizing antibodies to exogenous FIX administered from the CFCs has been reported to occur in approximately 10% of individuals with severe FIX deficiency which can greatly interfere with the ability to treat bleedings. See, e.g., Male et al. (2021) Hemophilia 106.1:123-129, herein incorporated by reference in its entirety for all purposes. Secondly, prophylaxis treatment requiring several injections per week or an injection every 2 weeks at a dedicated center represents a significant treatment burden on the patient and a notable economic burden to healthcare systems and society. See, e.g., Burke et al. (2021) Orphanet. J. Rare Dis. 16:143, herein incorporated by reference in its entirety for all purposes. Even though prophylaxis drives the risk of spontaneous joint bleeding down, it does not completely eliminate it, leading to remaining chronic pain and disability. See, e.g., Burke et al. (2021) Orphanet. J. Rare Dis. 16:143, herein incorporated by reference in its entirety for all purposes. A treatment that would lead to sustained plasma levels of functional FIX protein on the long-term is thus still needed.

[1087] Adeno-associated viral (AAV) vector gene therapies are under investigation for hemophilia B. Clinical trial data demonstrates sustained endogenous production of FIX in some patients which results in the elimination of the need for infusion of replacement FIX. See, e.g., Von Drygalski (2020) Blood 136(supp 1):13, herein incorporated by reference in its entirety for all purposes. However, AAV expression of FIX is episomal, therefore durability of expression remains unknown until further long-term data on efficacy are generated.

[1088] Several recombinant adeno-associated viral (rAAV) vector episomal gene therapies are under Phase 3 investigation for hemophilia B. These rAAV vectors deliver codon-optimized Padua variant human F9 gene associated with a liver-specific promoter to the nuclei of hepatocytes where it will be maintained as an extrachromosomal circular episome. The resulting expressed Padua FIX protein is a variant of the wild type FIX protein which is estimated to have an eight-fold increase in FIX specific activity compared to the wild type FIX. See, e.g., VandenDriessche et al. (2018) Mol. Ther. 26.1:14-16, herein incorporated by reference in its entirety for all purposes. However, AAV expression of FIX is episomal, therefore durability of expression remains unknown until further long-term data on efficacy are generated.

[1089] Methods. Provided are methods of treating a FIX deficiency in a subject and methods of treating hemophilia B in a subject and methods of preventing or inhibiting spontaneous bleeding in a subject having hemophilia B. The hemophilia B can be any type of hemophilia B (e.g., mild hemophilia B, moderate hemophilia B, or severe hemophilia B). Hemophilia B is described in more detail elsewhere herein.

[1090] Such methods can comprise administering any of the F9 nucleic acid constructs described herein (or any of the compositions comprising a F9 nucleic acid construct described herein, including, for example, vectors or lipid nanoparticles) to the subject in combination with a plasma cell depleting agent or combination comprising the plasma cell depleting agent such that a therapeutically effective level of FIX expression is achieved in the subject. The plasma cell depleting agent or combination comprising the plasma cell depleting agent can be administered prior to, simultaneously with, or after the nucleic acid construct. In one example, the plasma cell depleting agent or combination comprising the plasma cell depleting agent is administered prior to the nucleic acid construct. In another example, the plasma cell depleting agent or combination comprising the plasma cell depleting agent is administered prior to and after the nucleic acid construct. In some methods, the F9 nucleic acid construct or composition comprising the F9 nucleic acid construct can be administered without a nuclease agent (e.g., if the F9 nucleic acid construct comprises elements needed for expression of FIX without integration into a target genomic locus). In some methods, the F9 nucleic acid construct can be administered together with a nuclease agent described herein. The plasma cell depleting agent or combination comprising the plasma cell depleting agent can be administered prior to, simultaneously with, or after the nuclease agent. In one example, the plasma cell depleting agent or combination comprising the plasma cell depleting agent is administered prior to the nuclease agent. In another example, the plasma cell depleting agent or combination comprising the plasma cell depleting agent is administered prior to and after the nuclease agent. The nuclease agent can cleave a nuclease target sequence within a target gene to create a cleavage site, the F9 nucleic acid construct can be inserted into the cleavage site to create a modified target gene, and FIX protein can be expressed from the modified target gene such that a therapeutically effective level of FIX expression is achieved in the subject. The FIX coding sequence can be operably linked to an endogenous promoter at the target genomic locus upon integration into the target genomic locus, or it can be operably linked to an exogenous promoter present in the nucleic acid construct. In one example, the nuclease agent is a CRISPR/Cas system, and the target gene is ALB (e.g., intron 1 of ALB). In such methods, the guide RNA can bind to the Cas protein and target the Cas protein to the guide RNA target sequence in intron 1 of the ALB gene, the Cas protein can cleave the guide RNA target sequence to create a cleavage site, the nucleic acid construct can be inserted into the cleavage site to create a modified ALB gene, and FIX protein can be expressed from the modified ALB gene such that a therapeutically effective level of FIX expression is achieved in the subject.

[1091] Such methods can comprise administering any of the F9 nucleic acid constructs described herein (or any of the compositions comprising a F9 nucleic acid construct described herein, including, for example, vectors or lipid nanoparticles) to the subject (e.g., a subject without preexisting immunity to the nucleic acid construct, the polypeptide of interest encoded by the nucleic acid construct, the nuclease agent or one or more nucleic acids encoding the nuclease agent, or a delivery vehicle for the nucleic acid construct, the nuclease agent, or the one or more nucleic acids encoding the nuclease agent, such as, e.g., AAV) in combination with a B cell depleting agent (e.g., anti-CD20×CD3 antigen-binding molecule) such that a therapeutically effective level of FIX expression is achieved in the subject. In some embodiments, a plasma cell depleting agent is not administered to the subject (e.g., a subject without preexisting immunity to the nucleic acid construct, the polypeptide of interest encoded by the nucleic acid construct, the nuclease agent or one or more nucleic acids encoding the nuclease agent, or a delivery vehicle for the nucleic acid construct, the nuclease agent, or the one or more nucleic acids encoding the nuclease agent, such as, e.g., AAV) simultaneously with the B cell depleting agent. In some embodiments, an immunoglobulin depleting agent is not administered to the subject (e.g., a subject without preexisting immunity to the nucleic acid construct, the polypeptide of interest encoded by the nucleic acid construct, the nuclease agent or one or more nucleic acids encoding the nuclease agent, or a delivery vehicle for the nucleic acid construct, the nuclease agent, or the one or more nucleic acids encoding the nuclease agent, such as, e.g., AAV) simultaneously with the B cell depleting agent. In some embodiments, neither a plasma cell depleting agent nor an immunoglobulin depleting agent is administered to the subject (e.g., a subject without preexisting immunity to the nucleic acid construct, the polypeptide of interest encoded by the nucleic acid construct, the nuclease agent or one or more nucleic acids encoding the nuclease agent, or a delivery vehicle for the nucleic acid construct, the nuclease agent, or the one or more nucleic acids encoding the nuclease agent, such as, e.g., AAV) simultaneously with the B cell depleting agent. In some embodiments, a plasma cell depleting agent is not administered to the subject (e.g., a subject without preexisting immunity to the nucleic acid construct, the polypeptide of interest encoded by the nucleic acid construct, the nuclease agent or one or more nucleic acids encoding the nuclease agent, or a delivery vehicle for the nucleic acid construct, the nuclease agent, or the one or more nucleic acids encoding the nuclease agent, such as, e.g., AAV) in combination with the B cell depleting agent. In some embodiments, an immunoglobulin depleting agent is not administered to the subject (e.g., a subject without preexisting immunity to the nucleic acid construct, the polypeptide of interest encoded by the nucleic acid construct, the nuclease agent or one or more nucleic acids encoding the nuclease agent, or a delivery vehicle for the nucleic acid construct, the nuclease agent, or the one or more nucleic acids encoding the nuclease agent, such as, e.g., AAV) in combination with the B cell depleting agent. In some embodiments, neither a plasma cell depleting agent nor an immunoglobulin depleting agent is administered to the subject (e.g., a subject without preexisting immunity to the nucleic acid construct, the polypeptide of interest encoded by the nucleic acid construct, the nuclease agent or one or more nucleic acids encoding the nuclease agent, or a delivery vehicle for the nucleic acid construct, the nuclease agent, or the one or more nucleic acids encoding the nuclease agent, such as, e.g., AAV) in combination with the B cell depleting agent. In some embodiments, an immunoglobulin depleting agent is not administered to the subject in combination with the B cell depleting agent. The B cell depleting agent can be administered prior to, simultaneously with, or after the nucleic acid construct. In one example, the B cell depleting agent is administered prior to the nucleic acid construct. In another example, the B cell depleting agent is administered prior to and after the nucleic acid construct. In some methods, the F9 nucleic acid construct or composition comprising the F9 nucleic acid construct can be administered without a nuclease agent (e.g., if the F9 nucleic acid construct comprises elements needed for expression of FIX without integration into a target genomic locus). In some methods, the F9 nucleic acid construct can be administered together with a nuclease agent described herein. The B cell depleting agent can be administered prior to, simultaneously with, or after the nuclease agent. In one example, the B cell depleting agent is administered prior to the nuclease agent. In another example, the B cell depleting agent is administered prior to and after the nuclease agent. The nuclease agent can cleave a nuclease target sequence within a target gene to create a cleavage site, the F9 nucleic acid construct can be inserted into the cleavage site to create a modified target gene, and FIX protein can be expressed from the modified target gene such that a therapeutically effective level of FIX expression is achieved in the subject. The FIX coding sequence can be operably linked to an endogenous promoter at the target genomic locus upon integration into the target genomic locus, or it can be operably linked to an exogenous promoter present in the nucleic acid construct. In one example, the nuclease agent is a CRISPR/Cas system, and the target gene is ALB (e.g., intron 1 of ALB). In such methods, the guide RNA can bind to the Cas protein and target the Cas protein to the guide RNA target sequence in intron 1 of the ALB gene, the Cas protein can cleave the guide RNA target sequence to create a cleavage site, the nucleic acid construct can be inserted into the cleavage site to create a modified ALB gene, and FIX protein can be expressed from the modified ALB gene such that a therapeutically effective level of FIX expression is achieved in the subject.

[1092] Treatment refers to any administration or application of a therapeutic for disease or disorder in a subject, and includes inhibiting the disease, arresting its development, relieving one or more symptoms of the disease, curing the disease, or preventing reoccurrence of one or more symptoms of the disease. For example, treatment of hemophilia B may comprise alleviating symptoms of hemophilia B. In one specific example, a method of preventing or inhibiting spontaneous bleeding in a subject having hemophilia B is provided. Hemophilia B is described in detail above and refers to a disorder caused by a missing or defective F9 gene or FIX polypeptide. The disorder includes conditions that are inherited and/or acquired (e.g., caused by a spontaneous mutation in the gene). The defective F9 gene or FIX polypeptide can result in reduced FIX level in the plasma and/or a reduced coagulation activity of FIX. Hemophilia B includes mild, moderate, and severe hemophilia B. For example, individuals with less than about 1% active factor are classified as having severe hemophilia, those with about 1-5% active factor have moderate hemophilia, and those with mild hemophilia have between about 5-40% of normal levels of active clotting factor. As used herein, “normal” or “healthy” individuals include those having between 50 and 160% of normal pooled plasma level of FIX activity and antigen levels. In one example, normal plasma FIX levels are about 3-5 μg/mL. In a specific example, normal FIX activity is considered to be about 100% of normal pooled plasma level of FIX activity or is considered to be 100% of normal pooled plasma level of FIX activity. In a specific example, normal plasma FIX levels are considered to be about 5 μg/mL or are considered to be 5 μg/mL. In some embodiments, the level of FIX (e.g., circulating FIX) can be measured by a coagulation and/or an immunologic assay. FIX procoagulant activity can be determined by the ability of the patient's plasma to correct the clotting time of FIX-deficient plasma.

[1093] In some methods, a therapeutically effective amount of the F9 nucleic acid construct or the composition comprising the F9 nucleic acid construct or the combination of the F9 nucleic acid construct and the plasma cell depleting agent or combination comprising the plasma cell depleting agent and the nuclease agent (e.g., CRISPR/Cas system) is administered to the subject. A therapeutically effective amount is an amount that produces the desired effect for which it is administered. The exact amount will depend on the purpose of the treatment, and will be ascertainable by one skilled in the art using known techniques. See, e.g., Lloyd (1999) The Art, Science and Technology of Pharmaceutical Compounding.

[1094] In some methods, a therapeutically effective amount of the F9 nucleic acid construct or the composition comprising the F9 nucleic acid construct or the combination of the F9 nucleic acid construct and the B cell depleting agent and the nuclease agent (e.g., CRISPR/Cas system) is administered to the subject. A therapeutically effective amount is an amount that produces the desired effect for which it is administered. The exact amount will depend on the purpose of the treatment, and will be ascertainable by one skilled in the art using known techniques. See, e.g., Lloyd (1999) The Art, Science and Technology of Pharmaceutical Compounding.

[1095] Therapeutic or pharmaceutical compositions comprising the compositions disclosed herein can be administered with suitable carriers, excipients, and other agents that are incorporated into formulations to provide improved transfer, delivery, tolerance, and the like. A multitude of appropriate formulations can be found in the formulary known to all pharmaceutical chemists: Remington's Pharmaceutical Sciences, Mack Publishing Company, Easton, PA. See also Powell et al. “Compendium of excipients for parenteral formulations” PDA (1998) J. Pharm. Sci. Technol. 52:238-311.

[1096] The compositions disclosed herein may be administered to relieve or prevent or decrease the severity of one or more of the symptoms of FIX deficiency or hemophilia B. Such symptoms are described in more detail elsewhere herein.

[1097] The methods disclosed herein can increase FIX protein levels and/or FIX activity levels in a cell or subject (e.g., circulating, serum, or plasma levels in a subject) and can comprise measuring FIX protein levels and/or activity levels in a cell or subject (e.g., circulating, serum, or plasma levels in a subject). In one example, the effectiveness of the treatment in a subject can be assessed by measuring serum or plasma FIX activity, wherein an increase in the subject's plasma level and/or activity of FIX indicates effectiveness of the treatment. In another example, effectiveness of the treatment can be determined by assessing clotting function in an aPTT assay and/or thrombin generation in an TGA-EA assay. In another example, effectiveness of the treatment can be determined by assessing the level or activity of Factor IX (e.g., circulating FIX) through a coagulation and/or an immunologic assay (e.g., a sandwich immunoassay, ELISA, or MSD).

[1098] In normal or healthy individuals, FIX activity and antigen levels vary between about 50% and 160% of normal pooled plasma, which is about 3-5 μg/mL, based on its purification from adult human plasma. See, e.g., Amiral et al. (1984) Clin. Chem. 30(9):1512-1516, herein incorporated by reference in its entirety for all purposes. In a specific example, normal FIX activity is considered to be about 100% of normal pooled plasma level of FIX activity or is considered to be 100% of normal pooled plasma level of FIX activity. In a specific example, normal plasma FIX levels are considered to be about 5 μg/mL or are considered to be 5 μg/mL. Individuals having less than 50% of normal plasma level of FIX activity and/or antigen levels are classified as having hemophilia. In particular, individuals with less than about 1% active FIX are classified as having severe hemophilia, while those with about 1-5% active FIX have moderate hemophilia. Individuals with mild hemophilia have between about 6-49% of normal levels of active clotting factor. In some embodiments, the level of circulating FIX can be measured by a coagulation and/or an immunologic assay using well known methods.

[1099] In some methods, plasma levels of FIX or FIX activity levels in a subject having hemophilia are increased to about or at least about 2%, about or at least about 3%, about or at least about 4%, about or at least about 5%, about or at least about 6%, about or at least about 7%, about or at least about 8%, about or at least about 9%, about or at least about 10%, about or at least about 11%, about or at least about 12%, about or at least about 13%, about or at least about 14%, about or at least about 15%, about or at least about 16%, about or at least about 17%, about or at least about 18%, about or at least about 19%, about or at least about 20%, about or at least about 21%, about or at least about 22%, about or at least about 23%, about or at least about 24%, about or at least about 25%, about or at least about 26%, about or at least about 27%, about or at least about 28%, about or at least about 29%, about or at least about 30%, about or at least about 31%, about or at least about 32%, about or at least about 33%, about or at least about 34%, about or at least about 35%, about or at least about 36%, about or at least about 37%, about or at least about 38%, about or at least about 39%, about or at least about 40%, about or at least about 41%, about or at least about 42%, about or at least about 43%, about or at least about 44%, about or at least about 45%, about or at least about 46%, about or at least about 47%, about or at least about 48%, about or at least about 49%, about or at least about 50%, or more, of normal level.

[1100] In some methods, circulating FIX protein levels are increased to about or at least about 0.05, about or at least about 0.1, about or at least about 0.2, about or at least about 0.5, about or at least about 1, about or at least about 2, about or at least about 3, or about or at least about 4 μg/mL. FIX protein levels may reach about 150 μg/mL, or more. In some methods, FIX protein levels are increased to at least about 4 μg/mL or about 4 μg/mL. In some methods, FIX protein levels are increased to about 4 μg/mL to about 5 μg/mL, about 4 μg/mL to 6 μg/mL, about 4 μg/mL to 8 μg/mL, about 4 μg/mL to about 10 μg/mL, or more. In some methods, FIX protein levels are increased to about 0.1 μg/mL to about 10 μg/mL, about 1 μg/mL to about 10 μg/mL, about 0.1 μg/mL to about 6 μg/mL, about 1 μg/mL to about 6 μg/mL, about 2 μg/mL to about 5 μg/mL, or about 3 μg/mL to about 5 μg/mL. For example, the compositions and methods disclosed herein are useful for increasing plasma levels of Factor IX in a subject having hemophilia to about 6, about 7, about 8, about 9, about 10, about 12, about 14, about 16, about 18, about 20, about 22, about 24, about 26, about 28, about 30, about 32, about 34, about 36, about 38, about 40, about 42, about 44, about 46, about 48, about 50, about 52, about 54, about 56, about 58, about 60, about 62, about 64, about 66, about 68, about 70, about 75, about 80, about 85, about 90, about 95, about 100, about 105, about 110, about 115, about 120, about 125, about 130, about 135, about 140, about 145, about 150 μg/mL, or more.

[1101] In some methods, plasma FIX activity and/or levels in a subject (e.g., having hemophilia) are increased by about or at least about 1%, about or at least about 2%, about or at least about 3%, about or at least about 4%, about or at least about 5%, about or at least about 6%, about or at least about 7%, about or at least about 8%, about or at least about 9%, about or at least about 10%, about or at least about 11%, about or at least about 12%, about or at least about 13%, about or at least about 14%, about or at least about 15%, about or at least about 16%, about or at least about 17%, about or at least about 18%, about or at least about 19%, about or at least about 20%, about or at least about 21%, about or at least about 22%, about or at least about 23%, about or at least about 24%, about or at least about 25%, about or at least about 26%, about or at least about 27%, about or at least about 28%, about or at least about 29%, about or at least about 30%, about or at least about 31%, about or at least about 32%, about or at least about 33%, about or at least about 34%, about or at least about 35%, about or at least about 36%, about or at least about 37%, about or at least about 38%, about or at least about 39%, about or at least about 40%, about or at least about 41%, about or at least about 42%, about or at least about 43%, about or at least about 44%, about or at least about 45%, about or at least about 46%, about or at least about 47%, about or at least about 48%, about or at least about 49%, about or at least about 50%, about or at least about 55%, about or at least about 60%, about or at least about 65%, about or at least about 70%, about or at least about 75%, about or at least about 80%, about or at least about 85%, about or at least about 90%, about or at least about 95%, about or at least about 100%, about or at least about 110%, about or at least about 120%, about or at least about 130%, about or at least about 140%, about or at least about 150%, about or at least about 160%, about or at least about 170%, about or at least about 180%, about or at least about 190%, about or at least about 200%, or more, as compared to the subject's plasma level and/or activity of FIX before administration.

[1102] In some methods, FIX activity and/or protein levels in a cell or population of cells (e.g., liver cells, or hepatocytes) are increased by about or at least about 1%, about or at least about 2%, about or at least about 3%, about or at least about 4%, about or at least about 5%, about or at least about 6%, about or at least about 7%, about or at least about 8%, about or at least about 9%, about or at least about 10%, about or at least about 11%, about or at least about 12%, about or at least about 13%, about or at least about 14%, about or at least about 15%, about or at least about 16%, about or at least about 17%, about or at least about 18%, about or at least about 19%, about or at least about 20%, about or at least about 21%, about or at least about 22%, about or at least about 23%, about or at least about 24%, about or at least about 25%, about or at least about 26%, about or at least about 27%, about or at least about 28%, about or at least about 29%, about or at least about 30%, about or at least about 31%, about or at least about 32%, about or at least about 33%, about or at least about 34%, about or at least about 35%, about or at least about 36%, about or at least about 37%, about or at least about 38%, about or at least about 39%, about or at least about 40%, about or at least about 41%, about or at least about 42%, about or at least about 43%, about or at least about 44%, about or at least about 45%, about or at least about 46%, about or at least about 47%, about or at least about 48%, about or at least about 49%, about or at least about 50%, about or at least about 55%, about or at least about 60%, about or at least about 65%, about or at least about 70%, about or at least about 75%, about or at least about 80%, about or at least about 85%, about or at least about 90%, about or at least about 95%, about or at least about 100%, about or at least about 110%, about or at least about 120%, about or at least about 130%, about or at least about 140%, about or at least about 150%, about or at least about 160%, about or at least about 170%, about or at least about 180%, about or at least about 190%, about or at least about 200%, or more, as compared to the FIX activity and/or protein levels before administration (e.g., a normal level).

[1103] Some methods comprise expressing a therapeutically effective amount of FIX protein (e.g., achieving a therapeutically effective level of circulating FIX coagulation activity in an individual). Some methods comprise achieving FIX activity or expression levels of at least about 5% to about 50% of normal or at least about 50% to about 150% of normal. Some methods comprise achieving an increase in FIX activity or expression over the patient's baseline FIX activity or expression of at least about 1% to about 50% of normal FIX activity, or at least about 5% to about 50% of normal FIX activity, or at least about 50% to about 150% of normal FIX activity. Some methods comprise achieving FIX activity or expression levels of between about 40% and about 150% of normal (i.e., between 40% and 150% of normal). Some methods comprise achieving FIX activity or expression levels of between about 40% and about 100% of normal (e.g., between 40% and 100% of normal). Some methods comprise achieving FIX activity levels of between about 40% and about 150% of normal (i.e., between 40% and 150% of normal). Some methods comprise achieving FIX activity levels of between about 40% and about 100% of normal (e.g., between 40% and 100% of normal). Some methods comprise achieving FIX expression levels of between about 40% and about 150% of normal (i.e., between 40% and 150% of normal). Some methods comprise achieving FIX expression levels of between about 40% and about 100% of normal (e.g., between 40% and 100% of normal).

[1104] In a specific example, the FIX activity levels in a subject are increased to between about 1% to about 300%, about 1% to about 250%, about 1% to about 200%, about 1% to about 190%, about 1% to about 180%, about 1% to about 170%, about 1% to about 160%, about 1% to about 150%, about 1% to about 140%, about 1% to about 130%, about 1% to about 120%, about 1% to about 110%, about 1% to about 100%, about 1% to about 90%, about 1% to about 80%, about 1% to about 70%, about 1% to about 60%, about 1% to about 50%, about 5% to about 300%, about 5% to about 250%, about 5% to about 200%, about 5% to about 190%, about 5% to about 180%, about 5% to about 170%, about 5% to about 160%, about 5% to about 150%, about 5% to about 140%, about 5% to about 130%, about 5% to about 120%, about 5% to about 110%, about 5% to about 100%, about 5% to about 90%, about 5% to about 80%, about 5% to about 70%, about 5% to about 60%, about 5% to about 50%, about 15% to about 300%, about 15% to about 250%, about 15% to about 200%, about 15% to about 190%, about 15% to about 180%, about 15% to about 170%, about 15% to about 160%, about 15% to about 150%, about 15% to about 140%, about 15% to about 130%, about 15% to about 120%, about 15% to about 110%, about 15% to about 100%, about 15% to about 90%, about 15% to about 80%, about 15% to about 70%, about 15% to about 60%, about 15% to about 50%, about 10% to about 300%, about 15% to about 300%, about 20% to about 300%, about 25% to about 300%, about 30% to about 300%, about 35% to about 300%, about 40% to about 300%, about 45% to about 300%, about 50% to about 300%, about 55% to about 300%, about 60% to about 300%, about 65% to about 300%, about 70% to about 300%, about 75% to about 300%, about 80% to about 300%, about 85% to about 300%, about 90% to about 300%, about 95% to about 300%, about 100% to about 300%, about 10% to about 200%, about 15% to about 200%, about 20% to about 200%, about 25% to about 200%, about 30% to about 200%, about 35% to about 200%, about 40% to about 200%, about 45% to about 200%, about 50% to about 200%, about 55% to about 200%, about 60% to about 200%, about 65% to about 200%, about 70% to about 200%, about 75% to about 200%, about 80% to about 200%, about 85% to about 200%, about 90% to about 200%, about 95% to about 200%, about 100% to about 200%, about 10% to about 150%, about 15% to about 150%, about 20% to about 150%, about 25% to about 150%, about 30% to about 150%, about 35% to about 150%, about 40% to about 150%, about 45% to about 150%, about 50% to about 150%, about 55% to about 150%, about 60% to about 150%, about 65% to about 150%, about 70% to about 150%, about 75% to about 150%, about 80% to about 150%, about 85% to about 150%, about 90% to about 150%, about 95% to about 150%, about 100% to about 150%, about 50% to about 300%, about 50% to about 250%, about 50% to about 200%, about 50% to about 190%, about 50% to about 180%, about 50% to about 170%, about 50% to about 160%, about 50% to about 150%, about 50% to about 140%, about 50% to about 130%, about 50% to about 120%, about 50% to about 110%, about 50% to about 100% of normal FIX activity levels (e.g., between about 50% to about 150% of normal FIX activity levels).

[1105] In a specific example, the FIX activity levels in a subject are increased to between about 5% to about 200%, about 10% to about 190%, about 20% to about 180%, about 30% to about 170%, about 40% to about 160%, about 50% to about 150%, about 60% to about 140%, about 70% to about 130%, about 80% to about 120%, or about 90% to about 110% of normal FIX activity levels (e.g., to or about 100% of normal FIX activity levels).

[1106] In a specific example, the plasma FIX levels in a subject are increased to between about 1% to about 300%, about 1% to about 250%, about 1% to about 200%, about 1% to about 190%, about 1% to about 180%, about 1% to about 170%, about 1% to about 160%, about 1% to about 150%, about 1% to about 140%, about 1% to about 130%, about 1% to about 120%, about 1% to about 110%, about 1% to about 100%, about 1% to about 90%, about 1% to about 80%, about 1% to about 70%, about 1% to about 60%, about 1% to about 50%, about 5% to about 300%, about 5% to about 250%, about 5% to about 200%, about 5% to about 190%, about 5% to about 180%, about 5% to about 170%, about 5% to about 160%, about 5% to about 150%, about 5% to about 140%, about 5% to about 130%, about 5% to about 120%, about 5% to about 110%, about 5% to about 100%, about 5% to about 90%, about 5% to about 80%, about 5% to about 70%, about 5% to about 60%, about 5% to about 50%, about 15% to about 300%, about 15% to about 250%, about 15% to about 200%, about 15% to about 190%, about 15% to about 180%, about 15% to about 170%, about 15% to about 160%, about 15% to about 150%, about 15% to about 140%, about 15% to about 130%, about 15% to about 120%, about 15% to about 110%, about 15% to about 100%, about 15% to about 90%, about 15% to about 80%, about 15% to about 70%, about 15% to about 60%, about 15% to about 50%, about 10% to about 300%, about 15% to about 300%, about 20% to about 300%, about 25% to about 300%, about 30% to about 300%, about 35% to about 300%, about 40% to about 300%, about 45% to about 300%, about 50% to about 300%, about 55% to about 300%, about 60% to about 300%, about 65% to about 300%, about 70% to about 300%, about 75% to about 300%, about 80% to about 300%, about 85% to about 300%, about 90% to about 300%, about 95% to about 300%, about 100% to about 300%, about 10% to about 200%, about 15% to about 200%, about 20% to about 200%, about 25% to about 200%, about 30% to about 200%, about 35% to about 200%, about 40% to about 200%, about 45% to about 200%, about 50% to about 200%, about 55% to about 200%, about 60% to about 200%, about 65% to about 200%, about 70% to about 200%, about 75% to about 200%, about 80% to about 200%, about 85% to about 200%, about 90% to about 200%, about 95% to about 200%, about 100% to about 200%, about 10% to about 150%, about 15% to about 150%, about 20% to about 150%, about 25% to about 150%, about 30% to about 150%, about 35% to about 150%, about 40% to about 150%, about 45% to about 150%, about 50% to about 150%, about 55% to about 150%, about 60% to about 150%, about 65% to about 150%, about 70% to about 150%, about 75% to about 150%, about 80% to about 150%, about 85% to about 150%, about 90% to about 150%, about 95% to about 150%, about 100% to about 150%, about 50% to about 300%, about 50% to about 250%, about 50% to about 200%, about 50% to about 190%, about 50% to about 180%, about 50% to about 170%, about 50% to about 160%, about 50% to about 150%, about 50% to about 140%, about 50% to about 130%, about 50% to about 120%, about 50% to about 110%, about 50% to about 100% of normal plasma FIX levels (e.g., between about 50% to about 150% of normal plasma FIX levels).

[1107] In a specific example, the plasma FIX levels in a subject are increased to between about 5% to about 200%, about 10% to about 190%, about 20% to about 180%, about 30% to about 170%, about 40% to about 160%, about 50% to about 150%, about 60% to about 140%, about 70% to about 130%, about 80% to about 120%, or about 90% to about 110% of normal plasma FIX levels (e.g., to or about 100% of normal plasma FIX levels).

[1108] In a specific example, the plasma FIX levels in a subject are increased to between about 0.25 μg/mL to about 15 μg/mL, about 0.25 μg/mL to about 14 μg/mL, about 0.25 μg/mL to about 13 μg/mL, about 0.25 μg/mL to about 12 μg/mL, about 0.25 μg/mL to about 11 μg/mL, about 0.25 μg/mL to about 10 μg/mL, about 0.25 μg/mL to about 9 μg/mL, about 0.25 μg/mL to about 8 μg/mL, about 0.25 μg/mL to about 7 μg/mL, about 0.25 μg/mL to about 6 μg/mL, about 0.25 μg/mL to about 5 μg/mL, about 0.25 μg/mL to about 4 μg/mL, about 0.25 μg/mL to about 3 μg/mL, about 0.25 μg/mL to about 2 μg/mL, about 0.25 μg/mL to about 1 μg/mL, about 0.75 μg/mL to about 15 μg/mL, about 0.75 μg/mL to about 14 μg/mL, about 0.75 μg/mL to about 13 μg/mL, about 0.75 μg/mL to about 12 μg/mL, about 0.75 μg/mL to about 11 μg/mL, about 0.75 μg/mL to about 10 μg/mL, about 0.75 μg/mL to about 9 μg/mL, about 0.75 μg/mL to about 8 μg/mL, about 0.75 μg/mL to about 7 μg/mL, about 0.75 μg/mL to about 6 μg/mL, about 0.75 μg/mL to about 5 μg/mL, about 0.75 μg/mL to about 4 μg/mL, about 0.75 μg/mL to about 3 μg/mL, about 0.75 μg/mL to about 2 μg/mL, about 0.75 μg/mL to about 1 μg/mL, about 0.5 μg/mL to about 15 μg/mL, about 0.75 μg/mL to about 15 μg/mL, about 1 μg/mL to about 15 μg/mL, about 2 μg/mL to about 15 μg/mL, about 3 μg/mL to about 15 μg/mL, about 4 μg/mL to about 15 μg/mL, about 5 μg/mL to about 15 μg/mL, about 0.5 μg/mL to about 10 μg/mL, about 0.75 μg/mL to about 10 μg/mL, about 1 μg/mL to about 10 μg/mL, about 2 μg/mL to about 10 μg/mL, about 3 μg/mL to about 10 μg/mL, about 4 μg/mL to about 10 μg/mL, about 5 μg/mL to about 10 μg/mL, about 0.5 μg/mL to about 7.5 μg/mL, about 0.75 μg/mL to about 7.5 μg/mL, about 1 μg/mL to about 7.5 μg/mL, about 2 μg/mL to about 7.5 μg/mL, about 2.5 μg/mL to about 7.5 μg/mL, about 3 μg/mL to about 7.5 μg/mL, about 4 μg/mL to about 7.5 μg/mL, about 5 μg/mL to about 7.5 μg/mL, about 2.5 μg/mL to about 15 μg/mL, about 2.5 μg/mL to about 14 μg/mL, about 2.5 μg/mL to about 13 μg/mL, about 2.5 μg/mL to about 12 μg/mL, about 2.5 μg/mL to about 11 μg/mL, about 2.5 μg/mL to about 10 μg/mL, about 2.5 μg/mL to about 9 μg/mL, about 2.5 μg/mL to about 8 μg/mL, about 2.5 μg/mL to about 7 μg/mL, about 2.5 μg/mL to about 6 μg/mL, about 2.5 μg/mL to about 5 μg/mL, about 3 μg/mL to about 15 μg/mL, about 3 μg/mL to about 14 μg/mL, about 3 μg/mL to about 13 μg/mL, about 3 μg/mL to about 12 μg/mL, about 3 μg/mL to about 11 μg/mL, about 3 μg/mL to about 10 μg/mL, about 3 μg/mL to about 9 μg/mL, about 3 μg/mL to about 8 μg/mL, about 3 μg/mL to about 7 μg/mL, about 3 μg/mL to about 6 μg/mL, about 3 μg/mL to about 5 μg/mL (e.g., between about 2.5 μg/mL to about 7.5 μg/mL or between about 3 μg/mL to about 5 μg/mL). In some embodiments, the recited expression levels are at least 1 month after administration. In some embodiments, the recited expression levels are at least 2 months after administration. In some embodiments, the recited expression levels are at least 3 months after administration. In some embodiments, the recited expression levels are at least 4 months after administration. In some embodiments, the recited expression levels are at least 5 months after administration. In some embodiments, the recited expression levels are at least 6 months after administration. In some embodiments, the recited expression levels are at least 9 months after administration. In some embodiments, the recited expression levels are at least 12 months after administration.

[1109] In a specific example, the plasma FIX levels in a subject are increased to between about 0.5 μg/mL to about 10 μg/mL, about 1 μg/mL to about 9 μg/mL, about 2 μg/mL to about 8 μg/mL, about 3 μg/mL to about 7 μg/mL, or about 4 μg/mL to about 6 μg/mL (e.g., to about 5 μg/mL). In some embodiments, the recited expression levels are at least 1 month after administration. In some embodiments, the recited expression levels are at least 2 months after administration. In some embodiments, the recited expression levels are at least 3 months after administration. In some embodiments, the recited expression levels are at least 4 months after administration. In some embodiments, the recited expression levels are at least 5 months after administration. In some embodiments, the recited expression levels are at least 6 months after administration. In some embodiments, the recited expression levels are at least 9 months after administration. In some embodiments, the recited expression levels are at least 12 months after administration.

[1110] In a specific example, the FIX activity levels in a subject are increased to at least about 15% of normal FIX activity levels. In a specific example, the plasma FIX levels in a subject are increased to at least about 15% of normal plasma FIX levels. In a specific example, the plasma FIX levels in a subject are increased to at least about 0.75 μg/mL. For example, the method can be a method of preventing or inhibiting spontaneous bleeding in a subject having hemophilia B, and the FIX activity levels in a subject are increased to at least about 15% of normal FIX activity levels or the plasma FIX levels in a subject are increased to at least about 15% of normal plasma FIX levels or the plasma FIX levels in a subject are increased to at least about 0.75 μg/mL.

[1111] In a specific example, the FIX activity levels in a subject are increased to no more than about 300%, no more than about 250%, no more than about 200%, or no more than about 150% of normal FIX activity levels. In a specific example, the plasma FIX levels in a subject are increased to no more than about 300%, no more than about 250%, no more than about 200%, or no more than about 150% of normal plasma FIX levels.

[1112] In a specific example, a subject has severe hemophilia, and the FIX activity levels in the subject are increased to at least about 1%, at least about 5%, at least about 10%, at least about 15%, at least about 20%, at least about 25%, at least about 30%, at least about 35%, at least about 40%, at least about 45%, at least about 50%, at least about 55%, at least about 60%, at least about 65%, at least about 70%, at least about 75%, at least about 80%, at least about 85%, at least about 90%, or at least about 100% of normal FIX activity levels.

[1113] In a specific example, a subject has severe hemophilia, and the plasma FIX levels in the subject are increased to at least about 1%, at least about 5%, at least about 10%, at least about 15%, at least about 20%, at least about 25%, at least about 30%, at least about 35%, at least about 40%, at least about 45%, at least about 50%, at least about 55%, at least about 60%, at least about 65%, at least about 70%, at least about 75%, at least about 80%, at least about 85%, at least about 90%, or at least about 100% of normal plasma FIX levels.

[1114] In a specific example, a subject has severe hemophilia, and the FIX activity levels in the subject are increased to more than about 1%, more than about 5%, more than about 10%, more than about 15%, more than about 20%, more than about 25%, more than about 30%, more than about 35%, more than about 40%, more than about 45%, more than about 50%, more than about 55%, more than about 60%, more than about 65%, more than about 70%, more than about 75%, more than about 80%, more than about 85%, more than about 90%, or more than about 100% of normal FIX activity levels.

[1115] In a specific example, a subject has severe hemophilia, and the plasma FIX levels in the subject are increased to more than about 1%, more than about 5%, more than about 10%, more than about 15%, more than about 20%, more than about 25%, more than about 30%, more than about 35%, more than about 40%, more than about 45%, more than about 50%, more than about 55%, more than about 60%, more than about 65%, more than about 70%, more than about 75%, more than about 80%, more than about 85%, more than about 90%, or more than about 100% of normal plasma FIX levels.

[1116] In a specific example, a subject has moderate hemophilia, and the FIX activity levels in the subject are increased to at least about 5%, at least about 10%, at least about 15%, at least about 20%, at least about 25%, at least about 30%, at least about 35%, at least about 40%, at least about 45%, at least about 50%, at least about 55%, at least about 60%, at least about 65%, at least about 70%, at least about 75%, at least about 80%, at least about 85%, at least about 90%, or at least about 100% of normal FIX activity levels.

[1117] In a specific example, a subject has moderate hemophilia, and the plasma FIX levels in the subject are increased to at least about 5%, at least about 10%, at least about 15%, at least about 20%, at least about 25%, at least about 30%, at least about 35%, at least about 40%, at least about 45%, at least about 50%, at least about 55%, at least about 60%, at least about 65%, at least about 70%, at least about 75%, at least about 80%, at least about 85%, at least about 90%, or at least about 100% of normal plasma FIX levels.

[1118] In a specific example, a subject has moderate hemophilia, and the FIX activity levels in the subject are increased to more than about 5%, more than about 10%, more than about 15%, more than about 20%, more than about 25%, more than about 30%, more than about 35%, more than about 40%, more than about 45%, more than about 50%, more than about 55%, more than about 60%, more than about 65%, more than about 70%, more than about 75%, more than about 80%, more than about 85%, more than about 90%, or more than about 100% of normal FIX activity levels.

[1119] In a specific example, a subject has moderate hemophilia, and the plasma FIX levels in the subject are increased to more than about 5%, more than about 10%, more than about 15%, more than about 20%, more than about 25%, more than about 30%, more than about 35%, more than about 40%, more than about 45%, more than about 50%, more than about 55%, more than about 60%, more than about 65%, more than about 70%, more than about 75%, more than about 80%, more than about 85%, more than about 90%, or more than about 100% of normal plasma FIX levels.

[1120] In a specific example, a subject has mild hemophilia, and the FIX activity levels in the subject are increased to at least about 10%, at least about 15%, at least about 20%, at least about 25%, at least about 30%, at least about 35%, at least about 40%, at least about 45%, at least about 50%, at least about 55%, at least about 60%, at least about 65%, at least about 70%, at least about 75%, at least about 80%, at least about 85%, at least about 90%, or at least about 100% of normal FIX activity levels.

[1121] In a specific example, a subject has mild hemophilia, and the plasma FIX levels in the subject are increased to at least about 10%, at least about 15%, at least about 20%, at least about 25%, at least about 30%, at least about 35%, at least about 40%, at least about 45%, at least about 50%, at least about 55%, at least about 60%, at least about 65%, at least about 70%, at least about 75%, at least about 80%, at least about 85%, at least about 90%, or at least about 100% of normal plasma FIX levels.

[1122] In a specific example, a subject has mild hemophilia, and the FIX activity levels in the subject are increased to more than about 5%, more than about 10%, more than about 15%, more than about 20%, more than about 25%, more than about 30%, more than about 35%, more than about 40%, more than about 45%, more than about 50%, more than about 55%, more than about 60%, more than about 65%, more than about 70%, more than about 75%, more than about 80%, more than about 85%, more than about 90%, or more than about 100% of normal FIX activity levels.

[1123] In a specific example, a subject has mild hemophilia, and the plasma FIX levels in the subject are increased to more than about 5%, more than about 10%, more than about 15%, more than about 20%, more than about 25%, more than about 30%, more than about 35%, more than about 40%, more than about 45%, more than about 50%, more than about 55%, more than about 60%, more than about 65%, more than about 70%, more than about 75%, more than about 80%, more than about 85%, more than about 90%, or more than about 100% of normal plasma FIX levels.

[1124] Some methods comprise achieving a durable effect, such as an at least 1 month, at least 2 months, at least 6 months, at least 1 year, or at least 2 year effect. Some methods comprise achieving the therapeutic effect in a durable and sustained manner, such as an at least 1 month, at least 2 months, at least 6 months, at least 1 year, or at least 2 year effect. In some methods, the increased circulating FIX activity and/or expression level is stable for at least 1 month, at least 2 months, at least 6 months, at least 1 year, or more. In some methods, a steady-state activity and/or level of FIX protein is achieved by at least 7 days, at least 14 days, or at least 28 days. In additional methods, the method comprises maintaining FIX activity and/or levels after a single dose for at least 1, at least 2, at least 4, or at least 6 months, or at least 1, at least 2, at least 3, at least 4, or at least 5 years. Some methods comprise achieving a durable or sustained effect in a human, such as an at least at least 8 weeks, at least 24 weeks, for example, at least 1 year (52 weeks), or optionally at least 2 year effect, and in some embodiments, at least 3 year, at least 4 year, or at least 5 year effect. Some methods comprise achieving the therapeutic effect in a human in a durable and sustained manner, such as an at least 8 weeks, at least 24 weeks, for example, at least 1 year, or optionally at least 2 year effect, and in some embodiments, at least 3 year, at least 4 year, or at least 5 year effect. In some methods, the increased FIX activity and/or expression level in a human is stable for at least at least 8 weeks, at least 24 weeks, for example, at least 1 year, optionally at least 2 years, and in some embodiments, at least 3 years, at least 4 years, or at least 5 years. In some methods, a steady-state activity and/or level of FIX in a human is achieved by at least 7 days, at least 14 days, or at least 28 days, optionally at least 56 days, at least 80 days, or at least 96 days. In additional methods, the method comprises maintaining FIX activity and/or levels after a single dose in a human for at least 8 weeks, at least 16 weeks, or at least 24 week, or in some embodiments at least 1 year, or at least 2 years, optionally at least 3 years, at least 4 years, or at least 5 years. For example, expression of the FIX can be sustained in the human subject for at least about 8 weeks, at least about 12 weeks, at least about 24 weeks, in certain embodiments, at least about 1 year, or at least about 2 years after treatment, and in some embodiments, at least 3 years, at least 4 years, or at least 5 years after treatment. Likewise, activity of the FIX can be sustained in the human subject for at least about 8 weeks, at least about 12 weeks, at least about 24 weeks, in certain embodiments for at least about 1 year, or at least about 2 years after treatment, and in some embodiments, at least 3 years, at least 4 years, or at least 5 years after treatment. In some methods, expression or activity of the FIX is maintained at a level higher than the expression or activity of the FIX prior to treatment (i.e., the subject's baseline). In some methods, expression or activity of the FIX is considered sustained if it is maintained at a therapeutically effective level of expression or activity. Relative durations, in other organisms, are understood based, e.g., on life span and developmental stages, are covered within the disclosure above. In some methods, expression or activity of the FIX is considered “sustained” if the expression or activity in a human at six months after administration, one year after administration, or two years after administration, the expression or activity is at least 50% of the expression or activity of the peak level of expression or activity measured for that subject. In certain embodiments, at six months, e.g., 24 weeks to 28 weeks, after administration the expression or activity is at least 50%, 55%, 60%, 65%, 70%, 75% or 80% of the expression or activity of the peak level of expression or activity measured for that subject. In certain embodiments, at one year, i.e., about 12 months, e.g., 11-13 months, after administration the expression or activity is at least 50%, 55%, 60%, 65%, 70%, 75% or 80% of the expression or activity of the peak level of expression or activity measured for that subject. In certain embodiments, at two years, i.e., about 24 months, e.g., 23-25 months, after administration the expression or activity is at least 50%, 55%, 60%, 65%, 70%, 75% or 80% of the expression or activity of the peak level of expression or activity measured for that subject. In certain embodiments, at six months after administration the expression or activity is at least 50%, preferably at least 60% of the expression or activity of the peak level of expression or activity measured for that subject. In certain embodiments, at one year after administration the expression or activity is at least 50%, preferably at least 60% of the expression or activity of the peak level of expression or activity measured for that subject. In certain embodiments, at two years after administration the expression or activity is at least 50%, preferably at least 60% of the expression or activity of the peak level of expression or activity measured for that subject. In preferred embodiments, the subject has routine monitoring of expression or activity levels of the FIX, e.g., weekly, monthly, particularly early after administration, e.g., within the first six months. Periodic measurements may establish that the effect on expression or activity is sustained at, e.g., 6 months after administration, one year after administration, or two years after administration. In some methods in neonatal subjects, the expression of the FIX is sustained when the neonatal subject becomes an adult. In some methods, the expression of the FIX is sustained for the lifetime of the subject or neonatal subject.

[1125] In some methods, the expression or activity of the FIX is at least 50% of the expression or activity of the FIX at a peak level of expression measured for the human subject at 24 weeks after the administering. In some methods, the expression or activity of the FIX is at least 50% of the expression or activity of the FIX at a peak level of expression measured for the human subject at one year after the administering. In some methods, the expression or activity of the FIX is at least 60% of the expression or activity of the FIX at a peak level of expression measured for the human subject at 24 weeks after the administering. In some methods, expression or activity of the FIX is at least 50% of the expression or activity of the FIX at a peak level of expression measured for the human subject at two years after the administering. In some methods, the expression or activity of the FIX is at least 60% of the expression or activity of the FIX at a peak level of expression measured for the human subject at 2 years after the administering. In some methods, the expression or activity of the FIX is at least 60% of the expression or activity of the FIX at a peak level of expression measured for the human subject at 24 weeks after the administering.

[1126] In some methods, combination therapies are used comprising the any of the compositions for expressing FIX disclosed herein together with an additional therapy suitable for treating hemophilia B or a FIX deficiency. As one example, the methods of described herein can be combined with the use of other hemostatic agents, blood factors, and medications. For example, the subject may be administered a therapeutically effective amount of one or more factors selected from the group consisting of factor XI, factor XII, prekallikrein, high molecular weight kininogen (HMWK), factor V, factor VII, factor VIII, factor X, factor XIII, factor II, factor VIIa, and von Willebrands factor. Additionally, or alternatively, treatment may further comprise administering a procoagulant, such as an activator of the intrinsic coagulation pathway, including factor Xa, factor IXa, factor XIa, factor XIIa, and VIIla, prekallekrein, and high-molecular weight kininogen; or an activator of the extrinsic coagulation pathway, including tissue factor, factor VIIa, factor Va, and factor Xa.

### B. Pompe Disease

[1127] In some methods disclosed herein, the polypeptide of interest is a multidomain therapeutic protein disclosed herein (e.g., a lysosomal alpha-glucosidase linked to a CD63-binding delivery domain or TfR-binding delivery domain), and the enzyme deficiency is GAA deficiency or Pompe disease. See, e.g., PCT/US2023/061858 and U.S. Ser. No. 18/163,698, each of which is herein incorporated by reference in its entirety for all purposes. In such methods, the nucleic acid constructs and compositions disclosed herein can be used in methods of introducing a nucleic acid construct encoding a polypeptide of interest in a cell or population of cells in a subject, methods of inserting or integrating a nucleic acid construct encoding a polypeptide of interest into a target genomic locus in a cell or population of cells in a subject, methods of expressing a polypeptide of interest (e.g., from a target genomic locus) in a cell or population of cells in a subject, methods of reducing glycogen accumulation in a cell or a population of cells or a tissue in a subject, methods of treating Pompe disease or GAA deficiency in a subject, and methods or preventing or reducing the onset of a sign or symptom of Pompe disease or GAA deficiency in a subject.

[1128] The multidomain therapeutic protein compositions disclosed herein (e.g., multidomain therapeutic protein nucleic acid constructs, or multidomain therapeutic protein nucleic acid constructs in combination with plasma cell depleting agents or combinations comprising plasma cell depleting agents and nuclease agents (e.g., CRISPR/Cas systems)) are useful for the treatment of GAA deficiency or Pompe disease and/or ameliorating at least one symptom associated with GAA deficiency or Pompe disease (e.g., as compared to a control, untreated subject). The multidomain therapeutic protein compositions disclosed herein (e.g., multidomain therapeutic protein nucleic acid constructs, or multidomain therapeutic protein nucleic acid constructs in combination with the nuclease agents (e.g., CRISPR/Cas systems)) are also useful for preventing or reducing the onset of a sign or symptom of GAA deficiency or Pompe disease (e.g., as compared to a control, untreated subject). Likewise, the compositions disclosed herein can be used for the preparation of a pharmaceutical composition or medicament for treating a subject having GAA deficiency or Pompe disease.

[1129] The multidomain therapeutic protein compositions disclosed herein (e.g., multidomain therapeutic protein nucleic acid constructs, or multidomain therapeutic protein nucleic acid constructs in combination with B cell depleting agents (e.g., anti-CD20×CD3 antigen-binding molecule) and nuclease agents (e.g., CRISPR/Cas systems)) are useful for the treatment of GAA deficiency or Pompe disease and/or ameliorating at least one symptom associated with GAA deficiency or Pompe disease (e.g., as compared to a control, untreated subject). The multidomain therapeutic protein compositions disclosed herein (e.g., multidomain therapeutic protein nucleic acid constructs, or multidomain therapeutic protein nucleic acid constructs in combination with the nuclease agents (e.g., CRISPR/Cas systems)) are also useful for preventing or reducing the onset of a sign or symptom of GAA deficiency or Pompe disease (e.g., as compared to a control, untreated subject). Likewise, the compositions disclosed herein can be used for the preparation of a pharmaceutical composition or medicament for treating a subject having GAA deficiency or Pompe disease.

[1130] With respect to GAA deficiency or Pompe disease, the terms “treat,” “treated,” “treating,” and “treatment,” include the administration of the multidomain therapeutic domain nucleic acid constructs disclosed herein (e.g., together with a plasma cell depleting agent or combination comprising the plasma cell depleting agent and a nuclease agent disclosed herein, or together with a B cell depleting agent (e.g., in a subject without preexisting immunity to the nucleic acid construct, the polypeptide of interest encoded by the nucleic acid construct, the nuclease agent or one or more nucleic acids encoding the nuclease agent, or a delivery vehicle for the nucleic acid construct, the nuclease agent, or the one or more nucleic acids encoding the nuclease agent, such as, e.g., AAV)) to subjects to prevent or delay the onset of the symptoms, complications, or biochemical indicia of GAA deficiency or Pompe disease, alleviating the symptoms or arresting or inhibiting further development of GAA deficiency or Pompe disease. Treatment may be prophylactic (to prevent or delay the onset of GAA deficiency or Pompe disease, or to prevent the manifestation of clinical or subclinical symptoms thereof) or therapeutic suppression or alleviation of symptoms after the manifestation of GAA deficiency or Pompe disease.

[1131] GAA deficiency refers expression and/or activity levels of GAA being lower in the subject (e.g., neonatal subject) than normal GAA expression and/or activity levels, such that the normal functions of GAA are not fully carried out in the subject (e.g., resulting in Pompe disease). Pompe disease is also known as acid maltase deficiency, acid maltase deficiency disease, alpha-1,4-glucosidase deficiency, AMD, deficiency of alpha-glucosidase, GAA deficiency, glycogen storage disease type II, glycogenosis type IL, GSD IL, GSD2, and Pompe's disease.

[1132] Pompe disease is an inherited disorder caused by the buildup of glycogen in the body's cells. The accumulation of glycogen in certain organs and tissues, especially muscles, impairs their ability to function normally. Different types of Pompe disease differ in severity and the age at which they appear. These types are known as infantile-onset Pompe disease (classic infantile-onset, and non-classic infantile-onset) and late-onset Pompe disease. Subjects with late-onset Pompe disease have higher GAA enzyme levels than are found in infantile-onset forms of the disease, but generally less than 40 percent of normal enzyme activity. Classic infantile-onset Pompe disease patients typically have less than 1 percent of GAA enzyme activity, while those with non-classic forms usually have less than 10 percent.

[1133] The classic form of infantile-onset Pompe disease begins within a few months of birth. Some phenotypes, such as cardiomyopathies, can be present at birth. Infants with this disorder typically experience muscle weakness (myopathy), poor muscle tone (hypotonia), an enlarged liver (hepatomegaly), and heart defects. Affected infants may also fail to gain weight and grow at the expected rate (failure to thrive) and have breathing problems. If untreated, this form of Pompe disease leads to death from heart failure in the first year of life.

[1134] The non-classic form of infantile-onset Pompe disease usually appears by age 1. It is characterized by delayed motor skills (such as rolling over and sitting) and progressive muscle weakness. The heart may be abnormally large (cardiomegaly), but affected individuals usually do not experience heart failure. The muscle weakness in this disorder leads to serious breathing problems, and most children with non-classic infantile-onset Pompe disease live only into early childhood.

[1135] The late-onset type of Pompe disease may not become apparent until later in childhood, adolescence, or adulthood. Late-onset Pompe disease is usually milder than the infantile-onset forms of this disorder and is less likely to involve the heart. Most individuals with late-onset Pompe disease experience progressive muscle weakness, especially in the legs and the trunk, including the muscles that control breathing. As the disorder progresses, breathing problems can lead to respiratory failure.

[1136] Mutations in the GAA gene can cause Pompe disease. The GAA gene encodes an enzyme called alpha-glucosidase. This enzyme is active in lysosomes. The enzyme normally breaks down glycogen into glucose. Mutations in the GAA gene prevent acid alpha-glucosidase from breaking down glycogen effectively, which allows this sugar to build up to toxic levels in lysosomes. This buildup damages organs and tissues throughout the body, particularly the muscles, leading to the progressive signs and symptoms of Pompe disease.

[1137] Since this is a genetic condition, the people who get this disease inherit it from a parent. It is common, however, that neither parent shows any symptoms. The disease is rare. In the United States, only 1 person in 40,000 is affected by Pompe disease. It can affect both males and females of all ethnic groups.

[1138] Symptoms of Pompe disease can be different, depending on when the disease makes itself present. For classic type, infant symptoms can include the following: weak muscles, poor muscle tone, enlarged liver, failure to gain weight and grow at the expected rate (failure to thrive), trouble breathing, feeding problems, infections in the respiratory system, and problems with hearing. For non-classic type, infant symptoms can include the following: motor skills delayed (such as rolling over and sitting), muscles get steadily weaker, abnormally large heart, and breathing problems. For late-onset type, symptoms can include the following: the legs and the trunk get steadily weaker, breathing problems, enlarged heart, increasing difficulty in walking, muscle pain over a large area, loss of the ability to exercise, falling often, frequent lung infections, shortness of breath when the person pushes himself or herself, headaches in the morning, becoming tired during the day, losing weight, cannot swallow as easily as before, irregular heartbeat, increased difficulty hearing, and higher levels of creatine kinase.

[1139] Pathology in Pompe disease can begin long before subjects present with symptoms. Pompe disease can be diagnosed by taking a blood sample, and enzymes in the blood are studied and counted. Confirmation can be made via DNA testing. For example, GAA enzyme activity can be measured by flow-injection tandem mass spectrometry, and full sequencing of the GAA gene is performed in newborns with low GAA enzyme activity. See, e.g., Ficicioglu et al. (2020) Int. J. Neonatal Screen. 6(4):89, Tang et al. (2020) Int. J. Neonatal Screen. 6(1):9, and Klug et al. (2020) Int. J. Neonatal Screen 6(1):11, each of which is herein incorporated by reference in its entirety for all purposes. GAA activity can be assessed by any known method. For example, to assess GAA activity (or deficiencies of activity), blood-based assays can measure GAA activity in dried blood spots or fresh blood. GAA activity can also be measured in fibroblasts from a skin biopsy or muscle biopsy. Other secondary measures can be measuring urine glucose tetrasaccharides by mass spectrometry. These can be combined with genetic analyses to diagnose in infantile and late onset Pompe disease. Asymptomatic subjects can be considered to have Pompe disease if diagnosed by genetic screening. For example, a subject described herein is considered to have Pompe disease, even if they are asymptomatic, if they have reduced GAA activity and a pathogenic GAA variant or mutation. Pathogenic GAA mutations and variants associated with Pompe disease are known. See, e.g., Ficicioglu et al. (2020) Int. J. Neonatal Screen. 6(4):89, Tang et al. (2020) Int. J. Neonatal Screen. 6(1):9, and Klug et al. (2020) Int. J. Neonatal Screen 6(1):11, each of which is herein incorporated by reference in its entirety for all purposes.

[1140] As is the case for several other lysosomal diseases, Pompe disease is currently treated by enzyme replacement therapy (ERT). Recombinant human GAA is delivered by intravenous infusion into patients every other week. While ERT has been successful in treating the cardiac manifestations of Pompe disease, skeletal muscle and the central nervous system (CNS) remain minimally treated by ERT.

[1141] The methods described herein can be used to treat a lysosomal alpha-glucosidase (GAA) deficiency in a subject in need thereof (e.g., a subject with Pompe disease). The Pompe disease can be any type of Pompe disease (e.g., infantile-onset Pompe disease (classic infantile-onset or non-classic infantile-onset) or late-onset Pompe disease). For example, the subject can have infantile-onset Pompe disease (e.g., classical infantile-onset Pompe disease). Pompe disease is described in more detail elsewhere herein. In some methods, the expressed multidomain therapeutic protein is delivered to and internalized by skeletal muscle, liver, or heart tissue in the subject. In some methods, the expressed multidomain therapeutic protein is delivered to and internalized by skeletal muscle or heart tissue in the subject. In some methods, the expressed multidomain therapeutic protein is delivered to and internalized by skeletal muscle tissue in the subject. In some methods, the expressed multidomain therapeutic protein is delivered to and internalized by liver tissue in the subject. In some methods, the expressed multidomain therapeutic protein is delivered to and internalized by heart tissue in the subject. In some methods, the expressed multidomain therapeutic protein is delivered to and internalized by skeletal muscle, liver, and heart tissue in the subject. In some methods, the expressed multidomain therapeutic protein is delivered to and internalized by skeletal muscle and heart tissue in the subject. In some methods, the expressed multidomain therapeutic protein is delivered to and internalized by skeletal muscle, liver, heart, or central nervous system tissue in the subject. In some methods, the expressed multidomain therapeutic protein is delivered to and internalized by skeletal muscle, heart, or central nervous system tissue in the subject. In some methods, the expressed multidomain therapeutic protein is delivered to and internalized by skeletal muscle tissue in the subject. In some methods, the expressed multidomain therapeutic protein is delivered to and internalized by liver tissue in the subject. In some methods, the expressed multidomain therapeutic protein is delivered to and internalized by heart tissue in the subject. In some methods, the expressed multidomain therapeutic protein is delivered to and internalized by central nervous system tissue in the subject. In some methods, the expressed multidomain therapeutic protein is delivered to and internalized by skeletal muscle, liver, heart, and central nervous system tissue in the subject. In some methods, the expressed multidomain therapeutic protein is delivered to and internalized by skeletal muscle, heart, and central nervous system tissue in the subject. In some methods, the method reduces glycogen accumulation in skeletal muscle, liver, or heart tissue in the subject. In some methods, the method reduces glycogen accumulation in skeletal muscle or heart tissue in the subject. In some methods, the method reduces glycogen accumulation in skeletal muscle tissue in the subject. In some methods, the method reduces glycogen accumulation in liver tissue in the subject. In some methods, the method reduces glycogen accumulation in heart tissue in the subject. For example, glycogen accumulation can be reduced in skeletal muscle, liver, and heart tissue in the subject. For example, glycogen accumulation can be reduced in skeletal muscle and heart tissue in the subject. In some methods, the method reduces glycogen accumulation in skeletal muscle, liver, heart, or central nervous system tissue in the subject. In some methods, the method reduces glycogen accumulation in skeletal muscle, heart, or central nervous system tissue in the subject. In some methods, the method reduces glycogen accumulation in skeletal muscle tissue in the subject. In some methods, the method reduces glycogen accumulation in liver tissue in the subject. In some methods, the method reduces glycogen accumulation in heart tissue in the subject. In some methods, the method reduces glycogen accumulation in central nervous system tissue in the subject. For example, glycogen accumulation can be reduced in skeletal muscle, liver, heart, and central nervous system tissue in the subject. For example, glycogen accumulation can be reduced in skeletal muscle, heart, and central nervous system tissue in the subject. In some cases, glycogen levels are reduced to wild type levels. In some cases, glycogen levels in skeletal muscle, heart, and/or central nervous system tissue are reduced to levels comparable to wild type levels at the same age. In some methods, the method improves muscle strength in the subject (e.g., restores muscle strength to wild type levels). In some methods, the method prevents loss of muscle strength in the subject compared to a control. In some methods, the method results in the subject having muscle strength comparable to wild type levels at the same age.

[1142] Such methods can comprise administering any of the multidomain therapeutic protein nucleic acid constructs described herein (or any of the compositions comprising a multidomain therapeutic protein nucleic acid construct described herein, including, for example, vectors or lipid nanoparticles) to the subject in combination with a plasma cell depleting agent or combination comprising the plasma cell depleting agent such that a therapeutically effective level of multidomain therapeutic protein or GAA expression or a therapeutically effective level of circulating multidomain therapeutic protein or GAA is achieved in the subject. The plasma cell depleting agent or combination comprising the plasma cell depleting agent can be administered prior to, simultaneously with, or after the nucleic acid construct. In one example, the plasma cell depleting agent or combination comprising the plasma cell depleting agent is administered prior to the nucleic acid construct. In another example, the plasma cell depleting agent or combination comprising the plasma cell depleting agent is administered prior to and after the nucleic acid construct. In some methods, the multidomain therapeutic protein nucleic acid construct or composition comprising the multidomain therapeutic protein nucleic acid construct can be administered without a nuclease agent (e.g., if the multidomain therapeutic protein nucleic acid construct comprises elements needed for expression of multidomain therapeutic protein without integration into a target genomic locus). In some methods, the multidomain therapeutic protein nucleic acid construct can be administered together with a nuclease agent described herein (e.g., simultaneously or sequentially in any order). The plasma cell depleting agent or combination comprising the plasma cell depleting agent can be administered prior to, simultaneously with, or after the nuclease agent. In one example, the plasma cell depleting agent or combination comprising the plasma cell depleting agent is administered prior to the nuclease agent. In another example, the plasma cell depleting agent or combination comprising the plasma cell depleting agent is administered prior to and after the nuclease agent. The nuclease agent can cleave a nuclease target sequence within a target genomic locus (e.g., target gene), the multidomain therapeutic protein nucleic acid construct can be inserted into the target genomic locus to create a modified target genomic locus, and the multidomain therapeutic protein can be expressed from the modified target genomic locus (e.g., such that a therapeutically effective level of multidomain therapeutic protein or GAA expression or a therapeutically effective level of circulating multidomain therapeutic protein or GAA is achieved in the subject). The multidomain therapeutic protein coding sequence can be operably linked to an endogenous promoter at the target genomic locus upon integration into the target genomic locus, or it can be operably linked to an exogenous promoter present in the nucleic acid construct. In one example, the nuclease agent is a CRISPR/Cas system, and the target gene is ALB (e.g., intron 1 of ALB). In such methods, the guide RNA can bind to the Cas protein and target the Cas protein to the guide RNA target sequence in intron 1 of the ALB gene, the Cas protein can cleave the guide RNA target, the nucleic acid construct can be inserted into the ALB gene to create a modified ALB gene, and multidomain therapeutic protein can be expressed from the modified ALB gene (e.g., such that a therapeutically effective level of multidomain therapeutic protein or GAA expression or a therapeutically effective level of circulating multidomain therapeutic protein or GAA is achieved in the subject).

[1143] Such methods can comprise administering any of the multidomain therapeutic protein nucleic acid constructs described herein (or any of the compositions comprising a multidomain therapeutic protein nucleic acid construct described herein, including, for example, vectors or lipid nanoparticles) to the subject (e.g., a subject without preexisting immunity to the nucleic acid construct, the polypeptide of interest encoded by the nucleic acid construct, the nuclease agent or one or more nucleic acids encoding the nuclease agent, or a delivery vehicle for the nucleic acid construct, the nuclease agent, or the one or more nucleic acids encoding the nuclease agent, such as, e.g., AAV) in combination with a B cell depleting agent (e.g., anti-CD20×CD3 antigen-binding molecule) such that a therapeutically effective level of multidomain therapeutic protein or GAA expression or a therapeutically effective level of circulating multidomain therapeutic protein or GAA is achieved in the subject. In some embodiments, a plasma cell depleting agent is not administered to the subject (e.g., a subject without preexisting immunity to the nucleic acid construct, the polypeptide of interest encoded by the nucleic acid construct, the nuclease agent or one or more nucleic acids encoding the nuclease agent, or a delivery vehicle for the nucleic acid construct, the nuclease agent, or the one or more nucleic acids encoding the nuclease agent, such as, e.g., AAV) simultaneously with the B cell depleting agent. In some embodiments, an immunoglobulin depleting agent is not administered to the subject (e.g., a subject without preexisting immunity to the nucleic acid construct, the polypeptide of interest encoded by the nucleic acid construct, the nuclease agent or one or more nucleic acids encoding the nuclease agent, or a delivery vehicle for the nucleic acid construct, the nuclease agent, or the one or more nucleic acids encoding the nuclease agent, such as, e.g., AAV) simultaneously with the B cell depleting agent. In some embodiments, neither a plasma cell depleting agent nor an immunoglobulin depleting agent is administered to the subject (e.g., a subject without preexisting immunity to the nucleic acid construct, the polypeptide of interest encoded by the nucleic acid construct, the nuclease agent or one or more nucleic acids encoding the nuclease agent, or a delivery vehicle for the nucleic acid construct, the nuclease agent, or the one or more nucleic acids encoding the nuclease agent, such as, e.g., AAV) simultaneously with the B cell depleting agent. In some embodiments, a plasma cell depleting agent is not administered to the subject (e.g., a subject without preexisting immunity to the nucleic acid construct, the polypeptide of interest encoded by the nucleic acid construct, the nuclease agent or one or more nucleic acids encoding the nuclease agent, or a delivery vehicle for the nucleic acid construct, the nuclease agent, or the one or more nucleic acids encoding the nuclease agent, such as, e.g., AAV) in combination with the B cell depleting agent. In some embodiments, an immunoglobulin depleting agent is not administered to the subject (e.g., a subject without preexisting immunity to the nucleic acid construct, the polypeptide of interest encoded by the nucleic acid construct, the nuclease agent or one or more nucleic acids encoding the nuclease agent, or a delivery vehicle for the nucleic acid construct, the nuclease agent, or the one or more nucleic acids encoding the nuclease agent, such as, e.g., AAV) in combination with the B cell depleting agent. In some embodiments, neither a plasma cell depleting agent nor an immunoglobulin depleting agent is administered to the subject (e.g., a subject without preexisting immunity to the nucleic acid construct, the polypeptide of interest encoded by the nucleic acid construct, the nuclease agent or one or more nucleic acids encoding the nuclease agent, or a delivery vehicle for the nucleic acid construct, the nuclease agent, or the one or more nucleic acids encoding the nuclease agent, such as, e.g., AAV) in combination with the B cell depleting agent. The B cell depleting agent can be administered prior to, simultaneously with, or after the nucleic acid construct. In one example, the B cell depleting agent is administered prior to the nucleic acid construct. In another example, the B cell depleting agent is administered prior to and after the nucleic acid construct. In some methods, the multidomain therapeutic protein nucleic acid construct or composition comprising the multidomain therapeutic protein nucleic acid construct can be administered without a nuclease agent (e.g., if the multidomain therapeutic protein nucleic acid construct comprises elements needed for expression of multidomain therapeutic protein without integration into a target genomic locus). In some methods, the multidomain therapeutic protein nucleic acid construct can be administered together with a nuclease agent described herein (e.g., simultaneously or sequentially in any order). The B cell depleting agent can be administered prior to, simultaneously with, or after the nuclease agent. In one example, the B cell depleting agent is administered prior to the nuclease agent. In another example, the B cell depleting agent is administered prior to and after the nuclease agent. The nuclease agent can cleave a nuclease target sequence within a target genomic locus (e.g., target gene), the multidomain therapeutic protein nucleic acid construct can be inserted into the target genomic locus to create a modified target genomic locus, and the multidomain therapeutic protein can be expressed from the modified target genomic locus (e.g., such that a therapeutically effective level of multidomain therapeutic protein or GAA expression or a therapeutically effective level of circulating multidomain therapeutic protein or GAA is achieved in the subject). The multidomain therapeutic protein coding sequence can be operably linked to an endogenous promoter at the target genomic locus upon integration into the target genomic locus, or it can be operably linked to an exogenous promoter present in the nucleic acid construct. In one example, the nuclease agent is a CRISPR/Cas system, and the target gene is ALB (e.g., intron 1 of ALB). In such methods, the guide RNA can bind to the Cas protein and target the Cas protein to the guide RNA target sequence in intron 1 of the ALB gene, the Cas protein can cleave the guide RNA target, the nucleic acid construct can be inserted into the ALB gene to create a modified ALB gene, and multidomain therapeutic protein can be expressed from the modified ALB gene (e.g., such that a therapeutically effective level of multidomain therapeutic protein or GAA expression or a therapeutically effective level of circulating multidomain therapeutic protein or GAA is achieved in the subject).

[1144] Also provided are methods of reducing glycogen accumulation in a cell or a population of cells or a tissue in a subject in need thereof (e.g., a subject with Pompe disease). Similarly, provided are methods of reducing glycogen accumulation in a cell or a population of cells. The Pompe disease can be any type of Pompe disease (e.g., infantile-onset Pompe disease (classic infantile-onset or non-classic infantile-onset) or late-onset Pompe disease). For example, the subject can have infantile-onset Pompe disease (e.g., classical infantile-onset Pompe disease). Pompe disease is described in more detail elsewhere herein. In some methods, the method reduces glycogen accumulation in skeletal muscle, liver, or heart tissue in the subject. In some methods, the method reduces glycogen accumulation in skeletal muscle or heart tissue in the subject. In some methods, the method reduces glycogen accumulation in skeletal muscle tissue in the subject. In some methods, the method reduces glycogen accumulation in liver tissue in the subject. In some methods, the method reduces glycogen accumulation in heart tissue in the subject. For example, glycogen accumulation can be reduced in skeletal muscle, liver, and heart tissue in the subject. For example, glycogen accumulation can be reduced in skeletal muscle and heart tissue in the subject. In some methods, the method reduces glycogen accumulation in skeletal muscle, liver, heart, or central nervous system tissue in the subject. In some methods, the method reduces glycogen accumulation in skeletal muscle, heart, or central nervous system tissue in the subject. In some methods, the method reduces glycogen accumulation in skeletal muscle tissue in the subject. In some methods, the method reduces glycogen accumulation in liver tissue in the subject. In some methods, the method reduces glycogen accumulation in heart tissue in the subject. In some methods, the method reduces glycogen accumulation in central nervous system tissue in the subject. For example, glycogen accumulation can be reduced in skeletal muscle, liver, heart, and central nervous system tissue in the subject. For example, glycogen accumulation can be reduced in skeletal muscle, heart, and central nervous system tissue in the subject. In some cases, glycogen levels are reduced to wild type levels. In some cases, glycogen levels in skeletal muscle, heart, and/or central nervous system tissue are reduced to levels comparable to wild type levels at the same age. In some methods, the method improves muscle strength in the subject (e.g., restores muscle strength to wild type levels). In some methods, the method prevents loss of muscle strength in the subject compared to a control. In some methods, the method results in the subject having muscle strength comparable to wild type levels at the same age.

[1145] Such methods can comprise administering any of the multidomain therapeutic protein nucleic acid constructs described herein (or any of the compositions comprising a multidomain therapeutic protein nucleic acid construct described herein, including, for example, vectors or lipid nanoparticles) to the subject in combination with a plasma cell depleting agent or combination comprising the plasma cell depleting agent such that a therapeutically effective level of multidomain therapeutic protein or GAA expression or a therapeutically effective level of circulating multidomain therapeutic protein or GAA is achieved in the subject. The plasma cell depleting agent or combination comprising the plasma cell depleting agent can be administered prior to, simultaneously with, or after the nucleic acid construct. In one example, the plasma cell depleting agent or combination comprising the plasma cell depleting agent is administered prior to the nucleic acid construct. In another example, the plasma cell depleting agent or combination comprising the plasma cell depleting agent is administered prior to and after the nucleic acid construct. In some methods, the multidomain therapeutic protein nucleic acid construct or composition comprising the multidomain therapeutic protein nucleic acid construct can be administered without a nuclease agent (e.g., if the multidomain therapeutic protein nucleic acid construct comprises elements needed for expression of multidomain therapeutic protein without integration into a target genomic locus). In some methods, the multidomain therapeutic protein nucleic acid construct can be administered together with a nuclease agent described herein (e.g., simultaneously or sequentially in any order). The plasma cell depleting agent or combination comprising the plasma cell depleting agent can be administered prior to, simultaneously with, or after the nuclease agent. In one example, the plasma cell depleting agent or combination comprising the plasma cell depleting agent is administered prior to the nuclease agent. In another example, the plasma cell depleting agent or combination comprising the plasma cell depleting agent is administered prior to and after the nuclease agent. The nuclease agent can cleave a nuclease target sequence within a target genomic locus (e.g., target gene), the multidomain therapeutic protein nucleic acid construct can be inserted into the target genomic locus to create a modified target genomic locus, and the multidomain therapeutic protein can be expressed from the modified target genomic locus (e.g., such that a therapeutically effective level of multidomain therapeutic protein or GAA expression or a therapeutically effective level of circulating multidomain therapeutic protein or GAA is achieved in the subject). The multidomain therapeutic protein coding sequence can be operably linked to an endogenous promoter at the target genomic locus upon integration into the target genomic locus, or it can be operably linked to an exogenous promoter present in the nucleic acid construct. In one example, the nuclease agent is a CRISPR/Cas system, and the target gene is ALB (e.g., intron 1 of ALB). In such methods, the guide RNA can bind to the Cas protein and target the Cas protein to the guide RNA target sequence in intron 1 of the ALB gene, the Cas protein can cleave the guide RNA target, the nucleic acid construct can be inserted into the ALB gene to create a modified ALB gene, and multidomain therapeutic protein can be expressed from the modified ALB gene (e.g., such that a therapeutically effective level of multidomain therapeutic protein or GAA expression or a therapeutically effective level of circulating multidomain therapeutic protein or GAA is achieved in the subject).

[1146] Such methods can comprise administering any of the multidomain therapeutic protein nucleic acid constructs described herein (or any of the compositions comprising a multidomain therapeutic protein nucleic acid construct described herein, including, for example, vectors or lipid nanoparticles) to the subject (e.g., a subject without preexisting immunity to the nucleic acid construct, the polypeptide of interest encoded by the nucleic acid construct, the nuclease agent or one or more nucleic acids encoding the nuclease agent, or a delivery vehicle for the nucleic acid construct, the nuclease agent, or the one or more nucleic acids encoding the nuclease agent, such as, e.g., AAV) in combination with a B cell depleting agent (e.g., anti-CD20×CD3 antigen-binding molecule) such that a therapeutically effective level of multidomain therapeutic protein or GAA expression or a therapeutically effective level of circulating multidomain therapeutic protein or GAA is achieved in the subject. In some embodiments, a plasma cell depleting agent is not administered to the subject (e.g., a subject without preexisting immunity to the nucleic acid construct, the polypeptide of interest encoded by the nucleic acid construct, the nuclease agent or one or more nucleic acids encoding the nuclease agent, or a delivery vehicle for the nucleic acid construct, the nuclease agent, or the one or more nucleic acids encoding the nuclease agent, such as, e.g., AAV) simultaneously with the B cell depleting agent. In some embodiments, an immunoglobulin depleting agent is not administered to the subject (e.g., a subject without preexisting immunity to the nucleic acid construct, the polypeptide of interest encoded by the nucleic acid construct, the nuclease agent or one or more nucleic acids encoding the nuclease agent, or a delivery vehicle for the nucleic acid construct, the nuclease agent, or the one or more nucleic acids encoding the nuclease agent, such as, e.g., AAV) simultaneously with the B cell depleting agent. In some embodiments, neither a plasma cell depleting agent nor an immunoglobulin depleting agent is administered to the subject (e.g., a subject without preexisting immunity to the nucleic acid construct, the polypeptide of interest encoded by the nucleic acid construct, the nuclease agent or one or more nucleic acids encoding the nuclease agent, or a delivery vehicle for the nucleic acid construct, the nuclease agent, or the one or more nucleic acids encoding the nuclease agent, such as, e.g., AAV) simultaneously with the B cell depleting agent. In some embodiments, a plasma cell depleting agent is not administered to the subject (e.g., a subject without preexisting immunity to the nucleic acid construct, the polypeptide of interest encoded by the nucleic acid construct, the nuclease agent or one or more nucleic acids encoding the nuclease agent, or a delivery vehicle for the nucleic acid construct, the nuclease agent, or the one or more nucleic acids encoding the nuclease agent, such as, e.g., AAV) in combination with the B cell depleting agent. In some embodiments, an immunoglobulin depleting agent is not administered to the subject (e.g., a subject without preexisting immunity to the nucleic acid construct, the polypeptide of interest encoded by the nucleic acid construct, the nuclease agent or one or more nucleic acids encoding the nuclease agent, or a delivery vehicle for the nucleic acid construct, the nuclease agent, or the one or more nucleic acids encoding the nuclease agent, such as, e.g., AAV) in combination with the B cell depleting agent. In some embodiments, neither a plasma cell depleting agent nor an immunoglobulin depleting agent is administered to the subject (e.g., a subject without preexisting immunity to the nucleic acid construct, the polypeptide of interest encoded by the nucleic acid construct, the nuclease agent or one or more nucleic acids encoding the nuclease agent, or a delivery vehicle for the nucleic acid construct, the nuclease agent, or the one or more nucleic acids encoding the nuclease agent, such as, e.g., AAV) in combination with the B cell depleting agent. The B cell depleting agent can be administered prior to, simultaneously with, or after the nucleic acid construct. In one example, the B cell depleting agent is administered prior to the nucleic acid construct. In another example, the B cell depleting agent is administered prior to and after the nucleic acid construct. In some methods, the multidomain therapeutic protein nucleic acid construct or composition comprising the multidomain therapeutic protein nucleic acid construct can be administered without a nuclease agent (e.g., if the multidomain therapeutic protein nucleic acid construct comprises elements needed for expression of multidomain therapeutic protein without integration into a target genomic locus). In some methods, the multidomain therapeutic protein nucleic acid construct can be administered together with a nuclease agent described herein (e.g., simultaneously or sequentially in any order). The B cell depleting agent can be administered prior to, simultaneously with, or after the nuclease agent. In one example, the B cell depleting agent is administered prior to the nuclease agent. In another example, the B cell depleting agent is administered prior to and after the nuclease agent. The nuclease agent can cleave a nuclease target sequence within a target genomic locus (e.g., target gene), the multidomain therapeutic protein nucleic acid construct can be inserted into the target genomic locus to create a modified target genomic locus, and the multidomain therapeutic protein can be expressed from the modified target genomic locus (e.g., such that a therapeutically effective level of multidomain therapeutic protein or GAA expression or a therapeutically effective level of circulating multidomain therapeutic protein or GAA is achieved in the subject). The multidomain therapeutic protein coding sequence can be operably linked to an endogenous promoter at the target genomic locus upon integration into the target genomic locus, or it can be operably linked to an exogenous promoter present in the nucleic acid construct. In one example, the nuclease agent is a CRISPR/Cas system, and the target gene is ALB (e.g., intron 1 of ALB). In such methods, the guide RNA can bind to the Cas protein and target the Cas protein to the guide RNA target sequence in intron 1 of the ALB gene, the Cas protein can cleave the guide RNA target, the nucleic acid construct can be inserted into the ALB gene to create a modified ALB gene, and multidomain therapeutic protein can be expressed from the modified ALB gene (e.g., such that a therapeutically effective level of multidomain therapeutic protein or GAA expression or a therapeutically effective level of circulating multidomain therapeutic protein or GAA is achieved in the subject).

[1147] Also provided are methods of treating Pompe disease in a subject. The Pompe disease can be any type of Pompe disease (e.g., infantile-onset Pompe disease (classic infantile-onset or non-classic infantile-onset) or late-onset Pompe disease). For example, the subject can have infantile-onset Pompe disease (e.g., classical infantile-onset Pompe disease). Pompe disease is described in more detail elsewhere herein. In some methods, the method reduces glycogen accumulation in skeletal muscle, liver, or heart tissue in the subject. In some methods, the method reduces glycogen accumulation in skeletal muscle or heart tissue in the subject. In some methods, the method reduces glycogen accumulation in skeletal muscle tissue in the subject. In some methods, the method reduces glycogen accumulation in liver tissue in the subject. In some methods, the method reduces glycogen accumulation in heart tissue in the subject. For example, glycogen accumulation can be reduced in skeletal muscle, liver, and heart tissue in the subject. For example, glycogen accumulation can be reduced in skeletal muscle and heart tissue in the subject. In some methods, the method reduces glycogen accumulation in skeletal muscle, liver, heart, or central nervous system tissue in the subject. In some methods, the method reduces glycogen accumulation in skeletal muscle, heart, or central nervous system tissue in the subject. In some methods, the method reduces glycogen accumulation in skeletal muscle tissue in the subject. In some methods, the method reduces glycogen accumulation in liver tissue in the subject. In some methods, the method reduces glycogen accumulation in heart tissue in the subject. In some methods, the method reduces glycogen accumulation in central nervous system tissue in the subject. For example, glycogen accumulation can be reduced in skeletal muscle, liver, heart, and central nervous system tissue in the subject. For example, glycogen accumulation can be reduced in skeletal muscle, heart, and central nervous system tissue in the subject. In some cases, glycogen levels are reduced to wild type levels. In some cases, glycogen levels in skeletal muscle, heart, and/or central nervous system tissue are reduced to levels comparable to wild type levels at the same age. In some methods, the method improves muscle strength in the subject (e.g., restores muscle strength to wild type levels). In some methods, the method prevents loss of muscle strength in the subject compared to a control. In some methods, the method results in the subject having muscle strength comparable to wild type levels at the same age.

[1148] Such methods can comprise administering any of the multidomain therapeutic protein nucleic acid constructs described herein (or any of the compositions comprising a multidomain therapeutic protein nucleic acid construct described herein, including, for example, vectors or lipid nanoparticles) to the subject in combination with a plasma cell depleting agent or combination comprising the plasma cell depleting agent such that a therapeutically effective level of multidomain therapeutic protein or GAA expression or a therapeutically effective level of circulating multidomain therapeutic protein or GAA is achieved in the subject. The plasma cell depleting agent or combination comprising the plasma cell depleting agent can be administered prior to, simultaneously with, or after the nucleic acid construct. In one example, the plasma cell depleting agent or combination comprising the plasma cell depleting agent is administered prior to the nucleic acid construct. In another example, the plasma cell depleting agent or combination comprising the plasma cell depleting agent is administered prior to and after the nucleic acid construct. In some methods, the multidomain therapeutic protein nucleic acid construct or composition comprising the multidomain therapeutic protein nucleic acid construct can be administered without a nuclease agent (e.g., if the multidomain therapeutic protein nucleic acid construct comprises elements needed for expression of multidomain therapeutic protein without integration into a target genomic locus). In some methods, the multidomain therapeutic protein nucleic acid construct can be administered together with a nuclease agent described herein (e.g., simultaneously or sequentially in any order). The plasma cell depleting agent or combination comprising the plasma cell depleting agent can be administered prior to, simultaneously with, or after the nuclease agent. In one example, the plasma cell depleting agent or combination comprising the plasma cell depleting agent is administered prior to the nuclease agent. In another example, the plasma cell depleting agent or combination comprising the plasma cell depleting agent is administered prior to and after the nuclease agent. The nuclease agent can cleave a nuclease target sequence within a target genomic locus (e.g., target gene), the multidomain therapeutic protein nucleic acid construct can be inserted into the target genomic locus to create a modified target genomic locus, and the multidomain therapeutic protein can be expressed from the modified target genomic locus (e.g., such that a therapeutically effective level of multidomain therapeutic protein or GAA expression or a therapeutically effective level of circulating multidomain therapeutic protein or GAA is achieved in the subject). The multidomain therapeutic protein coding sequence can be operably linked to an endogenous promoter at the target genomic locus upon integration into the target genomic locus, or it can be operably linked to an exogenous promoter present in the nucleic acid construct. In one example, the nuclease agent is a CRISPR/Cas system, and the target gene is ALB (e.g., intron 1 of ALB). In such methods, the guide RNA can bind to the Cas protein and target the Cas protein to the guide RNA target sequence in intron 1 of the ALB gene, the Cas protein can cleave the guide RNA target, the nucleic acid construct can be inserted into the ALB gene to create a modified ALB gene, and multidomain therapeutic protein can be expressed from the modified ALB gene (e.g., such that a therapeutically effective level of multidomain therapeutic protein or GAA expression or a therapeutically effective level of circulating multidomain therapeutic protein or GAA is achieved in the subject).

[1149] Such methods can comprise administering any of the multidomain therapeutic protein nucleic acid constructs described herein (or any of the compositions comprising a multidomain therapeutic protein nucleic acid construct described herein, including, for example, vectors or lipid nanoparticles) to the subject (e.g., a subject without preexisting immunity to the nucleic acid construct, the polypeptide of interest encoded by the nucleic acid construct, the nuclease agent or one or more nucleic acids encoding the nuclease agent, or a delivery vehicle for the nucleic acid construct, the nuclease agent, or the one or more nucleic acids encoding the nuclease agent, such as, e.g., AAV) in combination with a B cell depleting agent (e.g., anti-CD20×CD3 antigen-binding molecule) such that a therapeutically effective level of multidomain therapeutic protein or GAA expression or a therapeutically effective level of circulating multidomain therapeutic protein or GAA is achieved in the subject. In some embodiments, a plasma cell depleting agent is not administered to the subject (e.g., a subject without preexisting immunity to the nucleic acid construct, the polypeptide of interest encoded by the nucleic acid construct, the nuclease agent or one or more nucleic acids encoding the nuclease agent, or a delivery vehicle for the nucleic acid construct, the nuclease agent, or the one or more nucleic acids encoding the nuclease agent, such as, e.g., AAV) simultaneously with the B cell depleting agent. In some embodiments, an immunoglobulin depleting agent is not administered to the subject (e.g., a subject without preexisting immunity to the nucleic acid construct, the polypeptide of interest encoded by the nucleic acid construct, the nuclease agent or one or more nucleic acids encoding the nuclease agent, or a delivery vehicle for the nucleic acid construct, the nuclease agent, or the one or more nucleic acids encoding the nuclease agent, such as, e.g., AAV) simultaneously with the B cell depleting agent. In some embodiments, neither a plasma cell depleting agent nor an immunoglobulin depleting agent is administered to the subject (e.g., a subject without preexisting immunity to the nucleic acid construct, the polypeptide of interest encoded by the nucleic acid construct, the nuclease agent or one or more nucleic acids encoding the nuclease agent, or a delivery vehicle for the nucleic acid construct, the nuclease agent, or the one or more nucleic acids encoding the nuclease agent, such as, e.g., AAV) simultaneously with the B cell depleting agent. In some embodiments, a plasma cell depleting agent is not administered to the subject (e.g., a subject without preexisting immunity to the nucleic acid construct, the polypeptide of interest encoded by the nucleic acid construct, the nuclease agent or one or more nucleic acids encoding the nuclease agent, or a delivery vehicle for the nucleic acid construct, the nuclease agent, or the one or more nucleic acids encoding the nuclease agent, such as, e.g., AAV) in combination with the B cell depleting agent. In some embodiments, an immunoglobulin depleting agent is not administered to the subject (e.g., a subject without preexisting immunity to the nucleic acid construct, the polypeptide of interest encoded by the nucleic acid construct, the nuclease agent or one or more nucleic acids encoding the nuclease agent, or a delivery vehicle for the nucleic acid construct, the nuclease agent, or the one or more nucleic acids encoding the nuclease agent, such as, e.g., AAV) in combination with the B cell depleting agent. In some embodiments, neither a plasma cell depleting agent nor an immunoglobulin depleting agent is administered to the subject (e.g., a subject without preexisting immunity to the nucleic acid construct, the polypeptide of interest encoded by the nucleic acid construct, the nuclease agent or one or more nucleic acids encoding the nuclease agent, or a delivery vehicle for the nucleic acid construct, the nuclease agent, or the one or more nucleic acids encoding the nuclease agent, such as, e.g., AAV) in combination with the B cell depleting agent. The B cell depleting agent can be administered prior to, simultaneously with, or after the nucleic acid construct. In one example, the B cell depleting agent is administered prior to the nucleic acid construct. In another example, the B cell depleting agent is administered prior to and after the nucleic acid construct. In some methods, the multidomain therapeutic protein nucleic acid construct or composition comprising the multidomain therapeutic protein nucleic acid construct can be administered without a nuclease agent (e.g., if the multidomain therapeutic protein nucleic acid construct comprises elements needed for expression of multidomain therapeutic protein without integration into a target genomic locus). In some methods, the multidomain therapeutic protein nucleic acid construct can be administered together with a nuclease agent described herein (e.g., simultaneously or sequentially in any order). The B cell depleting agent can be administered prior to, simultaneously with, or after the nuclease agent. In one example, the B cell depleting agent is administered prior to the nuclease agent. In another example, the B cell depleting agent is administered prior to and after the nuclease agent. The nuclease agent can cleave a nuclease target sequence within a target genomic locus (e.g., target gene), the multidomain therapeutic protein nucleic acid construct can be inserted into the target genomic locus to create a modified target genomic locus, and the multidomain therapeutic protein can be expressed from the modified target genomic locus (e.g., such that a therapeutically effective level of multidomain therapeutic protein or GAA expression or a therapeutically effective level of circulating multidomain therapeutic protein or GAA is achieved in the subject). The multidomain therapeutic protein coding sequence can be operably linked to an endogenous promoter at the target genomic locus upon integration into the target genomic locus, or it can be operably linked to an exogenous promoter present in the nucleic acid construct. In one example, the nuclease agent is a CRISPR/Cas system, and the target gene is ALB (e.g., intron 1 of ALB). In such methods, the guide RNA can bind to the Cas protein and target the Cas protein to the guide RNA target sequence in intron 1 of the ALB gene, the Cas protein can cleave the guide RNA target, the nucleic acid construct can be inserted into the ALB gene to create a modified ALB gene, and multidomain therapeutic protein can be expressed from the modified ALB gene (e.g., such that a therapeutically effective level of multidomain therapeutic protein or GAA expression or a therapeutically effective level of circulating multidomain therapeutic protein or GAA is achieved in the subject).

[1150] Treatment refers to any administration or application of a therapeutic for disease or disorder in a subject, and includes inhibiting the disease, arresting its development, relieving one or more symptoms of the disease, curing the disease, or preventing reoccurrence of one or more symptoms of the disease. For example, treatment of Pompe disease may comprise alleviating symptoms of Pompe disease. Pompe disease is described in detail above and refers to a disorder caused by a missing or defective GAA gene or GAA polypeptide. The defective GAA gene or GAA polypeptide can result in reduced GAA expression and/or an activity of GAA.

[1151] Also provided are methods of preventing or reducing the onset of a sign or symptom of Pompe disease in a subject (e.g., as compared to an untreated, control subject). By preventing is meant the sign or symptom of the Pompe disease never becomes present. Such signs and symptoms are well-known and are described in more detail elsewhere herein. The Pompe disease can be any type of Pompe disease (e.g., infantile-onset Pompe disease (classic infantile-onset or non-classic infantile-onset) or late-onset Pompe disease). For example, Pompe disease can be infantile-onset Pompe disease (e.g., classical infantile-onset Pompe disease). Pompe disease is described in more detail elsewhere herein. In some methods, the method prevents or reduces glycogen accumulation in skeletal muscle, liver, or heart tissue in the subject. In some methods, the method prevents or reduces glycogen accumulation in skeletal muscle or heart tissue in the subject. In some methods, the method prevents or reduces glycogen accumulation in skeletal muscle tissue in the subject. In some methods, the method prevents or reduces glycogen accumulation in liver tissue in the subject. In some methods, the method prevents or reduces glycogen accumulation in heart tissue in the subject. For example, glycogen accumulation can be prevented or reduced in skeletal muscle, liver, and heart tissue in the subject. For example, glycogen accumulation can be prevented or reduced in skeletal muscle and heart tissue in the subject. In some methods, the method prevents or reduces glycogen accumulation in skeletal muscle, liver, heart, or central nervous system tissue in the subject. In some methods, the method prevents or reduces glycogen accumulation in skeletal muscle, heart, or central nervous system tissue in the subject. In some methods, the method prevents or reduces glycogen accumulation in skeletal muscle tissue in the subject. In some methods, the method prevents or reduces glycogen accumulation in liver tissue in the subject. In some methods, the method prevents or reduces glycogen accumulation in heart tissue in the subject. In some methods, the method prevents or reduces glycogen accumulation in central nervous system tissue in the subject. For example, glycogen accumulation can be prevented or reduced in skeletal muscle, liver, heart, and central nervous system tissue in the subject. For example, the onset of glycogen accumulation can be prevented or reduced in skeletal muscle, heart, and central nervous system tissue in the subject.

[1152] Such methods can comprise administering any of the multidomain therapeutic protein nucleic acid constructs described herein (or any of the compositions comprising a multidomain therapeutic protein nucleic acid construct described herein, including, for example, vectors or lipid nanoparticles) to the subject in combination with a plasma cell depleting agent or combination comprising the plasma cell depleting agent such that a therapeutically effective level of multidomain therapeutic protein or GAA expression or a therapeutically effective level of circulating multidomain therapeutic protein or GAA is achieved in the subject. The plasma cell depleting agent or combination comprising the plasma cell depleting agent can be administered prior to, simultaneously with, or after the nucleic acid construct. In one example, the plasma cell depleting agent or combination comprising the plasma cell depleting agent is administered prior to the nucleic acid construct. In another example, the plasma cell depleting agent or combination comprising the plasma cell depleting agent is administered prior to and after the nucleic acid construct. In some methods, the multidomain therapeutic protein nucleic acid construct or composition comprising the multidomain therapeutic protein nucleic acid construct can be administered without a nuclease agent (e.g., if the multidomain therapeutic protein nucleic acid construct comprises elements needed for expression of multidomain therapeutic protein without integration into a target genomic locus). In some methods, the multidomain therapeutic protein nucleic acid construct can be administered together with a nuclease agent described herein (e.g., simultaneously or sequentially in any order). The plasma cell depleting agent or combination comprising the plasma cell depleting agent can be administered prior to, simultaneously with, or after the nuclease agent. In one example, the plasma cell depleting agent or combination comprising the plasma cell depleting agent is administered prior to the nuclease agent. In another example, the plasma cell depleting agent or combination comprising the plasma cell depleting agent is administered prior to and after the nuclease agent. The nuclease agent can cleave a nuclease target sequence within a target genomic locus (e.g., target gene), the multidomain therapeutic protein nucleic acid construct can be inserted into the target genomic locus to create a modified target genomic locus, and the multidomain therapeutic protein can be expressed from the modified target genomic locus (e.g., such that a therapeutically effective level of multidomain therapeutic protein or GAA expression or a therapeutically effective level of circulating multidomain therapeutic protein or GAA is achieved in the subject). The multidomain therapeutic protein coding sequence can be operably linked to an endogenous promoter at the target genomic locus upon integration into the target genomic locus, or it can be operably linked to an exogenous promoter present in the nucleic acid construct. In one example, the nuclease agent is a CRISPR/Cas system, and the target gene is ALB (e.g., intron 1 of ALB). In such methods, the guide RNA can bind to the Cas protein and target the Cas protein to the guide RNA target sequence in intron 1 of the ALB gene, the Cas protein can cleave the guide RNA target, the nucleic acid construct can be inserted into the ALB gene to create a modified ALB gene, and multidomain therapeutic protein can be expressed from the modified ALB gene (e.g., such that a therapeutically effective level of multidomain therapeutic protein or GAA expression or a therapeutically effective level of circulating multidomain therapeutic protein or GAA is achieved in the subject).

[1153] Such methods can comprise administering any of the multidomain therapeutic protein nucleic acid constructs described herein (or any of the compositions comprising a multidomain therapeutic protein nucleic acid construct described herein, including, for example, vectors or lipid nanoparticles) to the subject (e.g., a subject without preexisting immunity to the nucleic acid construct, the polypeptide of interest encoded by the nucleic acid construct, the nuclease agent or one or more nucleic acids encoding the nuclease agent, or a delivery vehicle for the nucleic acid construct, the nuclease agent, or the one or more nucleic acids encoding the nuclease agent, such as, e.g., AAV) in combination with a B cell depleting agent (e.g., anti-CD20×CD3 antigen-binding molecule) such that a therapeutically effective level of multidomain therapeutic protein or GAA expression or a therapeutically effective level of circulating multidomain therapeutic protein or GAA is achieved in the subject. In some embodiments, a plasma cell depleting agent is not administered to the subject (e.g., a subject without preexisting immunity to the nucleic acid construct, the polypeptide of interest encoded by the nucleic acid construct, the nuclease agent or one or more nucleic acids encoding the nuclease agent, or a delivery vehicle for the nucleic acid construct, the nuclease agent, or the one or more nucleic acids encoding the nuclease agent, such as, e.g., AAV) simultaneously with the B cell depleting agent. In some embodiments, an immunoglobulin depleting agent is not administered to the subject (e.g., a subject without preexisting immunity to the nucleic acid construct, the polypeptide of interest encoded by the nucleic acid construct, the nuclease agent or one or more nucleic acids encoding the nuclease agent, or a delivery vehicle for the nucleic acid construct, the nuclease agent, or the one or more nucleic acids encoding the nuclease agent, such as, e.g., AAV) simultaneously with the B cell depleting agent. In some embodiments, neither a plasma cell depleting agent nor an immunoglobulin depleting agent is administered to the subject (e.g., a subject without preexisting immunity to the nucleic acid construct, the polypeptide of interest encoded by the nucleic acid construct, the nuclease agent or one or more nucleic acids encoding the nuclease agent, or a delivery vehicle for the nucleic acid construct, the nuclease agent, or the one or more nucleic acids encoding the nuclease agent, such as, e.g., AAV) simultaneously with the B cell depleting agent. In some embodiments, a plasma cell depleting agent is not administered to the subject (e.g., a subject without preexisting immunity to the nucleic acid construct, the polypeptide of interest encoded by the nucleic acid construct, the nuclease agent or one or more nucleic acids encoding the nuclease agent, or a delivery vehicle for the nucleic acid construct, the nuclease agent, or the one or more nucleic acids encoding the nuclease agent, such as, e.g., AAV) in combination with the B cell depleting agent. In some embodiments, an immunoglobulin depleting agent is not administered to the subject (e.g., a subject without preexisting immunity to the nucleic acid construct, the polypeptide of interest encoded by the nucleic acid construct, the nuclease agent or one or more nucleic acids encoding the nuclease agent, or a delivery vehicle for the nucleic acid construct, the nuclease agent, or the one or more nucleic acids encoding the nuclease agent, such as, e.g., AAV) in combination with the B cell depleting agent. In some embodiments, neither a plasma cell depleting agent nor an immunoglobulin depleting agent is administered to the subject (e.g., a subject without preexisting immunity to the nucleic acid construct, the polypeptide of interest encoded by the nucleic acid construct, the nuclease agent or one or more nucleic acids encoding the nuclease agent, or a delivery vehicle for the nucleic acid construct, the nuclease agent, or the one or more nucleic acids encoding the nuclease agent, such as, e.g., AAV) in combination with the B cell depleting agent. The B cell depleting agent can be administered prior to, simultaneously with, or after the nucleic acid construct. In one example, the B cell depleting agent is administered prior to the nucleic acid construct. In another example, the B cell depleting agent is administered prior to and after the nucleic acid construct. In some methods, the multidomain therapeutic protein nucleic acid construct or composition comprising the multidomain therapeutic protein nucleic acid construct can be administered without a nuclease agent (e.g., if the multidomain therapeutic protein nucleic acid construct comprises elements needed for expression of multidomain therapeutic protein without integration into a target genomic locus). In some methods, the multidomain therapeutic protein nucleic acid construct can be administered together with a nuclease agent described herein (e.g., simultaneously or sequentially in any order). The B cell depleting agent can be administered prior to, simultaneously with, or after the nuclease agent. In one example, the B cell depleting agent is administered prior to the nuclease agent. In another example, the B cell depleting agent is administered prior to and after the nuclease agent. The nuclease agent can cleave a nuclease target sequence within a target genomic locus (e.g., target gene), the multidomain therapeutic protein nucleic acid construct can be inserted into the target genomic locus to create a modified target genomic locus, and the multidomain therapeutic protein can be expressed from the modified target genomic locus (e.g., such that a therapeutically effective level of multidomain therapeutic protein or GAA expression or a therapeutically effective level of circulating multidomain therapeutic protein or GAA is achieved in the subject). The multidomain therapeutic protein coding sequence can be operably linked to an endogenous promoter at the target genomic locus upon integration into the target genomic locus, or it can be operably linked to an exogenous promoter present in the nucleic acid construct. In one example, the nuclease agent is a CRISPR/Cas system, and the target gene is ALB (e.g., intron 1 of ALB). In such methods, the guide RNA can bind to the Cas protein and target the Cas protein to the guide RNA target sequence in intron 1 of the ALB gene, the Cas protein can cleave the guide RNA target, the nucleic acid construct can be inserted into the ALB gene to create a modified ALB gene, and multidomain therapeutic protein can be expressed from the modified ALB gene (e.g., such that a therapeutically effective level of multidomain therapeutic protein or GAA expression or a therapeutically effective level of circulating multidomain therapeutic protein or GAA is achieved in the subject).

[1154] In some methods, a therapeutically effective amount of the multidomain therapeutic protein nucleic acid construct or the composition comprising the multidomain therapeutic protein nucleic acid construct or the combination of the multidomain therapeutic protein nucleic acid construct and the plasma cell depleting agent or combination comprising the plasma cell depleting agent and the nuclease agent (e.g., CRISPR/Cas system) is administered to the subject. A therapeutically effective amount is an amount that produces the desired effect for which it is administered. The exact amount will depend on the purpose of the treatment, and will be ascertainable by one skilled in the art using known techniques. See, e.g., Lloyd (1999) The Art, Science and Technology of Pharmaceutical Compounding. In a specific example, serum levels of at least about 2 μg/mL or at least about 5 μg/mL of the multidomain therapeutic protein are considered therapeutically effective and correspond to complete correction of glycogen storage in muscles.

[1155] In some methods, a therapeutically effective amount of the multidomain therapeutic protein nucleic acid construct or the composition comprising the multidomain therapeutic protein nucleic acid construct or the combination of the multidomain therapeutic protein nucleic acid construct and the B cell depleting agent and the nuclease agent (e.g., CRISPR/Cas system) is administered to the subject. A therapeutically effective amount is an amount that produces the desired effect for which it is administered. The exact amount will depend on the purpose of the treatment, and will be ascertainable by one skilled in the art using known techniques. See, e.g., Lloyd (1999) The Art, Science and Technology of Pharmaceutical Compounding. In a specific example, serum levels of at least about 2 μg/mL or at least about 5 μg/mL of the multidomain therapeutic protein are considered therapeutically effective and correspond to complete correction of glycogen storage in muscles.

[1156] The methods disclosed herein can increase multidomain therapeutic protein or GAA protein levels and/or multidomain therapeutic protein or GAA activity levels in a cell or subject (e.g., circulating, serum, or plasma levels in a subject) and can comprise measuring multidomain therapeutic protein or GAA protein levels and/or multidomain therapeutic protein or GAA activity levels in a cell or subject (e.g., circulating, serum, or plasma levels in a subject). In one example, the methods result in increased expression of the multidomain therapeutic protein in the subject compared to a method comprising administering an episomal expression vector encoding the multidomain therapeutic protein. For example, the methods can result in increased serum levels of the multidomain therapeutic protein in the subject compared to a method comprising administering an episomal expression vector encoding the multidomain therapeutic protein. The methods can also result in increased multidomain therapeutic protein activity or GAA activity in the subject compared to a method comprising administering an episomal expression vector encoding the multidomain therapeutic protein. Levels of circulating multidomain therapeutic protein or GAA activity can be measured by using well-known methods.

[1157] In some methods, GAA activity and/or expression levels in a subject are increased to about or at least about 2%, about or at least about 10%, about or at least about 25%, about or at least about 40%, about or at least about 50%, about or at least about 75%, or at least about 100%, or more, of normal level. In some methods, GAA activity and/or expression levels in a subject are increased to about or at least about 40%, about or at least about 50%, about or at least about 75%, or at least about 100%, or more, of normal level. In certain embodiments, the level of expression or activity is measured in a cell or tissue in which a sign or symptom of the GAA loss of function is present. For example, when the loss of function results in muscle dysfunction, the level or activity of the multidomain therapeutic protein or GAA is measured in a muscle cell. It is understood that depending on the exogenous protein, the level of activity of the multidomain therapeutic protein may not compare 1:1 with a native GAA protein based on weight. In such embodiment, the relative activity of the multidomain therapeutic protein and the native GAA can be compared. In certain embodiments, the loss of function is nearly complete such that a relative activity cannot be determined. In certain embodiments, the comparison is made to an appropriate control subject. Selection of an appropriate control subject is within the ability of those of skill in the art. In certain embodiments, the level of expression is sufficient to treat at least one sign or symptom resulting from the loss of function of the GAA. GAA activity can be assessed by any known method. For example, to assess GAA activity (or deficiencies of activity), blood-based assays can measure GAA activity in dried blood spots or fresh blood. GAA activity can also be measured in fibroblasts from a skin biopsy or muscle biopsy. Other secondary measures can be measuring urine glucose tetrasaccharides by mass spectrometry.

[1158] In some methods, circulating multidomain therapeutic protein levels (i.e., serum levels) are about or at least about 0.5, about or at least about 1, about or at least about 2, about or at least about 3, about or at least about 4, about or at least about 5, about or at least about 6, about or at least about 7, about or at least about 8, about or at least about 9, or about or at least about 10 μg/mL. In some methods, multidomain therapeutic protein levels are at least about 1 μg/mL or about 1 μg/mL. In some methods, multidomain therapeutic protein levels are at least about 2 μg/mL or about 2 μg/mL. In some methods, multidomain therapeutic protein levels are at least about 5 μg/mL or about 5 μg/mL. In some methods, multidomain therapeutic protein levels are about 1 μg/mL to about 30 μg/mL, about 2 μg/mL to about 30 μg/mL, about 3 μg/mL to about 30 μg/mL, about 4 μg/mL to about 30 μg/mL, about 5 μg/mL to about 30 μg/mL, about 1 μg/mL to about 20 μg/mL, about 2 μg/mL to about 20 μg/mL, about 3 μg/mL to about 20 μg/mL, about 4 μg/mL to about 20 μg/mL, about 5 μg/mL to about 20 μg/mL. For example, the method can result in multidomain therapeutic protein levels of about 2 μg/mL to about 30 μg/mL or 2 μg/mL to about 20 μg/mL. For example, the method can result in multidomain therapeutic protein levels of about 5 μg/mL to about 30 μg/mL or 5 μg/mL to about 20 μg/mL. In some embodiments, the recited expression levels are at least 1 month after administration. In some embodiments, the recited expression levels are at least 2 months after administration. In some embodiments, the recited expression levels are at least 3 months after administration. In some embodiments, the recited expression levels are at least 4 months after administration. In some embodiments, the recited expression levels are at least 5 months after administration. In some embodiments, the recited expression levels are at least 6 months after administration. In some embodiments, the recited expression levels are at least 9 months after administration. In some embodiments, the recited expression levels are at least 12 months after administration.

[1159] In some methods, the method increases expression and/or activity of GAA or the multidomain therapeutic protein over the subject's baseline expression and/or activity (i.e., expression and/or activity prior to administration). In some methods, the method increases expression and/or activity of GAA over the subject's baseline expression and/or activity (i.e., expression and/or activity prior to administration. In some methods, GAA activity and/or GAA expression or serum levels in a subject are increased by about or at least about 10%, about or at least about 25%, about or at least about 50%, about or at least about 75%, or about or at least about 100%, or more, as compared to the subject's GAA expression or serum levels and/or activity (e.g., GAA activity) before administration (i.e., the subject's baseline levels). It is understood that depending on the multidomain therapeutic protein, the level of activity of the multidomain therapeutic protein may not compare 1:1 with a native protein based on weight. In such embodiment, the relative activity of the multidomain therapeutic protein and the native GAA can be compared. In certain embodiments, the loss of function is nearly complete such that a relative activity cannot be determined. In certain embodiments, the level of expression is sufficient to treat at least one sign or symptom resulting from the loss of function of the GAA.

[1160] In some methods, the method increases expression and/or activity of the multidomain therapeutic protein over the cell's baseline expression and/or activity (i.e., expression and/or activity prior to administration). In some methods, the method increases expression and/or activity of GAA over the cell's baseline expression and/or activity (i.e., expression and/or activity prior to administration. In some methods, GAA activity and/or expression levels in a cell or population of cells (e.g., liver cells, or hepatocytes) are increased by about or at least about 10%, about or at least about 25%, about or at least about 50%, about or at least about 75%, about or at least about 100%, or more, as compared to the GAA activity and/or expression levels before administration (i.e., the subject's baseline levels). It is understood that depending on the multidomain therapeutic protein, the level of activity of the multidomain therapeutic protein may not compare 1:1 with a native GAA protein based on weight. In such embodiment, the relative activity of the multidomain therapeutic protein and the native GAA protein can be compared. In certain embodiments, the GAA loss of function is nearly complete such that a relative activity cannot be determined. In certain embodiments, the level of expression is sufficient to treat at least one sign or symptom resulting from the loss of function of the GAA.

[1161] In a specific example, the GAA activity levels in a subject are increased to no more than about 300%, no more than about 250%, no more than about 200%, or no more than about 150% of normal GAA activity levels.

[1162] In a specific example, the GAA activity levels in the subject are increased to at least about 1%, at least about 5%, at least about 10%, at least about 15%, at least about 20%, at least about 25%, at least about 30%, at least about 35%, at least about 40%, at least about 45%, at least about 50%, at least about 55%, at least about 60%, at least about 65%, at least about 70%, at least about 75%, at least about 80%, at least about 85%, at least about 90%, or at least about 100% of normal GAA activity levels. In a specific example, the GAA activity levels in the subject are increased to at least about 40%, at least about 45%, at least about 50%, at least about 55%, at least about 60%, at least about 65%, at least about 70%, at least about 75%, at least about 80%, at least about 85%, at least about 90%, or at least about 100% of normal GAA activity levels.

[1163] In a specific example, a subject has infantile-onset Pompe disease (e.g., classic infantile-onset Pompe disease), and the GAA activity levels in the subject are increased to at least about 1%, at least about 5%, at least about 10%, at least about 15%, at least about 20%, at least about 25%, at least about 30%, at least about 35%, at least about 40%, at least about 45%, at least about 50%, at least about 55%, at least about 60%, at least about 65%, at least about 70%, at least about 75%, at least about 80%, at least about 85%, at least about 90%, or at least about 100% of normal GAA activity levels. In a specific example, a subject has infantile-onset Pompe disease (e.g., classic infantile-onset Pompe disease), and the GAA activity levels in the subject are increased to at least about 40%, at least about 45%, at least about 50%, at least about 55%, at least about 60%, at least about 65%, at least about 70%, at least about 75%, at least about 80%, at least about 85%, at least about 90%, or at least about 100% of normal GAA activity levels.

[1164] In a specific example, a subject has infantile-onset Pompe disease (e.g., classic or non-classic infantile-onset Pompe disease), and the GAA activity levels in the subject are increased to at least about 2% at least about 5%, at least about 10%, at least about 15%, at least about 20%, at least about 25%, at least about 30%, at least about 35%, at least about 40%, at least about 45%, at least about 50%, at least about 55%, at least about 60%, at least about 65%, at least about 70%, at least about 75%, at least about 80%, at least about 85%, at least about 90%, or at least about 100% of normal GAA activity levels (e.g., at least about 10%, at least about 15%, at least about 20%, at least about 25%, at least about 30%, at least about 35%, at least about 40%, at least about 45%, at least about 50%, at least about 55%, at least about 60%, at least about 65%, at least about 70%, at least about 75%, at least about 80%, at least about 85%, at least about 90%, or at least about 100% of normal GAA activity levels). In a specific example, a subject has infantile-onset Pompe disease (e.g., classic or non-classic infantile-onset Pompe disease), and the GAA activity levels in the subject are increased to at least about 40%, at least about 45%, at least about 50%, at least about 55%, at least about 60%, at least about 65%, at least about 70%, at least about 75%, at least about 80%, at least about 85%, at least about 90%, or at least about 100% of normal GAA activity levels.

[1165] In a specific example, a subject has late-onset Pompe disease, and the GAA activity levels in the subject are increased to at least about 2% at least about 5%, at least about 10%, at least about 15%, at least about 20%, at least about 25%, at least about 30%, at least about 35%, at least about 40%, at least about 45%, at least about 50%, at least about 55%, at least about 60%, at least about 65%, at least about 70%, at least about 75%, at least about 80%, at least about 85%, at least about 90%, or at least about 100% of normal GAA activity levels (e.g., at least about 40%, at least about 45%, at least about 50%, at least about 55%, at least about 60%, at least about 65%, at least about 70%, at least about 75%, at least about 80%, at least about 85%, at least about 90%, or at least about 100% of normal GAA activity levels).

[1166] In a specific example, a subject has infantile-onset Pompe disease (e.g., classic infantile-onset Pompe disease), and the GAA activity levels in the subject are increased to more than about 1%, more than about 5%, more than about 10%, more than about 15%, more than about 20%, more than about 25%, more than about 30%, more than about 35%, more than about 40%, more than about 45%, more than about 50%, more than about 55%, more than about 60%, more than about 65%, more than about 70%, more than about 75%, more than about 80%, more than about 85%, more than about 90%, or more than about 100% of normal GAA activity levels. In a specific example, a subject has infantile-onset Pompe disease (e.g., classic infantile-onset Pompe disease), and the GAA activity levels in the subject are increased to more than about 40%, more than about 45%, more than about 50%, more than about 55%, more than about 60%, more than about 65%, more than about 70%, more than about 75%, more than about 80%, more than about 85%, more than about 90%, or more than about 100% of normal GAA activity levels

[1167] In a specific example, a subject has infantile-onset Pompe disease (e.g., classic or non-classic infantile-onset Pompe disease), and the GAA activity levels in the subject are increased to more than about 2% more than about 5%, more than about 10%, more than about 15%, more than about 20%, more than about 25%, more than about 30%, more than about 35%, more than about 40%, more than about 45%, more than about 50%, more than about 55%, more than about 60%, more than about 65%, more than about 70%, more than about 75%, more than about 80%, more than about 85%, more than about 90%, or more than about 100% of normal GAA activity levels (e.g., more than about 10%, more than about 15%, more than about 20%, more than about 25%, more than about 30%, more than about 35%, more than about 40%, more than about 45%, more than about 50%, more than about 55%, more than about 60%, more than about 65%, more than about 70%, more than about 75%, more than about 80%, more than about 85%, more than about 90%, or more than about 100% of normal GAA activity levels). In a specific example, a subject has infantile-onset Pompe disease (e.g., classic or non-classic infantile-onset Pompe disease), and the GAA activity levels in the subject are increased to more than about 40%, more than about 45%, more than about 50%, more than about 55%, more than about 60%, more than about 65%, more than about 70%, more than about 75%, more than about 80%, more than about 85%, more than about 90%, or more than about 100% of normal GAA activity levels.

[1168] In a specific example, a subject has late-onset Pompe disease, and the GAA activity levels in the subject are increased to more than about 2% more than about 5%, more than about 10%, more than about 15%, more than about 20%, more than about 25%, more than about 30%, more than about 35%, more than about 40%, more than about 45%, more than about 50%, more than about 55%, more than about 60%, more than about 65%, more than about 70%, more than about 75%, more than about 80%, more than about 85%, more than about 90%, or more than about 100% of normal GAA activity levels (e.g., more than about 40%, more than about 45%, more than about 50%, more than about 55%, more than about 60%, more than about 65%, more than about 70%, more than about 75%, more than about 80%, more than about 85%, more than about 90%, or more than about 100% of normal GAA activity levels).

[1169] In some methods, the method results in increased expression of the multidomain therapeutic protein in the subject (e.g., neonatal subject) compared to a method comprising administering an episomal expression vector encoding the polypeptide of interest in a control subject. In some methods, the method results in increased serum levels of the multidomain therapeutic protein in the subject (e.g., neonatal subject) compared to a method comprising administering an episomal expression vector encoding the polypeptide of interest to a control subject.

[1170] In some methods, the method increases expression or activity of the multidomain therapeutic protein or GAA over the subject's (e.g., neonatal subject's) baseline expression or activity of the multidomain therapeutic protein or GAA (i.e., any percent change in expression that is larger than typical error bars). In some methods, the method results in expression of the multidomain therapeutic protein or GAA at a detectable level above zero, e.g., at a statistically significant level, a clinically relevant level.

[1171] Some methods comprise achieving a durable or sustained effect in a human, such as an at least at least 8 weeks, at least 24 weeks, for example, at least 1 year, or optionally at least 2 year effect, and in some embodiments, at least 3 year, at least 4 year, or at least 5 year effect. Some methods comprise achieving the therapeutic effect in a human in a durable and sustained manner, such as an at least 8 weeks, at least 24 weeks, for example, at least 1 year, or optionally at least 2 year effect, and in some embodiments, at least 3 year, at least 4 year, or at least 5 year effect. In some methods, the increased multidomain therapeutic protein or GAA activity and/or expression level in a human is stable for at least at least 8 weeks, at least 24 weeks, for example, at least 1 year, optionally at least 2 years, and in some embodiments, at least 3 years, at least 4 years, or at least 5 years. In some methods, a steady-state activity and/or level of multidomain therapeutic protein or GAA in a human is achieved by at least 7 days, at least 14 days, or at least 28 days, optionally at least 56 days, at least 80 days, or at least 96 days. In additional methods, the method comprises maintaining multidomain therapeutic protein or GAA activity and/or levels after a single dose in a human for at least 8 weeks, at least 16 weeks, or at least 24 week, or in some embodiments at least 1 year, or at least 2 years, optionally at least 3 years, at least 4 years, or at least 5 years. For example, expression of the multidomain therapeutic protein or GAA can be sustained in the human subject for at least about 8 weeks, at least about 12 weeks, at least about 24 weeks, in certain embodiments, at least about 1 year, or at least about 2 years after treatment, and in some embodiments, at least 3 years, at least 4 years, or at least 5 years after treatment. Likewise, activity of the multidomain therapeutic protein or GAA can be sustained in the human subject for at least about 8 weeks, at least about 12 weeks, at least about 24 weeks, in certain embodiments for at least about 1 year, or at least about 2 years after treatment, and in some embodiments, at least 3 years, at least 4 years, or at least 5 years after treatment. In some methods, expression or activity of the multidomain therapeutic protein or GAA is maintained at a level higher than the expression or activity of the multidomain therapeutic protein or GAA prior to treatment (i.e., the subject's baseline). In some methods, expression or activity of the multidomain therapeutic protein or GAA is considered sustained if it is maintained at a therapeutically effective level of expression or activity. Relative durations, in other organisms, are understood based, e.g., on life span and developmental stages, are covered within the disclosure above. In some methods, expression or activity of the multidomain therapeutic protein or GAA is considered “sustained” if the expression or activity in a human at six months after administration, one year after administration, or two years after administration, the expression or activity is at least 50% of the expression or activity of the peak level of expression or activity measured for that subject. In certain embodiments, at six months, e.g., at 24 weeks to 28 weeks, after administration the expression or activity is at least 50%, 55%, 60%, 65%, 70%, 75% or 80% of the expression or activity of the peak level of expression or activity measured for that subject. In certain embodiments, at one year, i.e., about 12 months, e.g., at 11-13 months, after administration the expression or activity is at least 50%, 55%, 60%, 65%, 70%, 75% or 80% of the expression or activity of the peak level of expression or activity measured for that subject. In certain embodiments, at two years, i.e., about 24 months, e.g., at 23-25 months, after administration the expression or activity is at least 50%, 55%, 60%, 65%, 70%, 75% or 80% of the expression or activity of the peak level of expression or activity measured for that subject. In certain embodiments, at six months after administration the expression or activity is at least 50%, preferably at least 60% of the expression or activity of the peak level of expression or activity measured for that subject. In certain embodiments, at one year after administration the expression or activity is at least 50%, preferably at least 60% of the expression or activity of the peak level of expression or activity measured for that subject. In certain embodiments, at two years after administration the expression or activity is at least 50%, preferably at least 60% of the expression or activity of the peak level of expression or activity measured for that subject. In preferred embodiments, the subject has routine monitoring of expression or activity levels of the polypeptide, e.g., weekly, monthly, particularly early after administration, e.g., within the first six months. Periodic measurements may establish that the effect on expression or activity is sustained at, e.g., 6 months after administration, one year after administration, or two years after administration. In some methods in neonatal subjects, the expression of the multidomain therapeutic protein or GAA is sustained when the neonatal subject becomes an adult. In some methods, the expression of the multidomain therapeutic protein or GAA is sustained for the lifetime of the subject or neonatal subject.

[1172] In some methods, the expression or activity of the multidomain therapeutic protein is at least 50% of the expression or activity of the multidomain therapeutic protein at a peak level of expression measured for the subject at 24 weeks after the administering. In some methods, the expression or activity of the multidomain therapeutic protein is at least 50% of the expression or activity of the multidomain therapeutic protein at a peak level of expression measured for the subject at one year after the administering. In some methods, the expression or activity of the multidomain therapeutic protein is at least 60% of the expression or activity of the multidomain therapeutic protein at a peak level of expression measured for the subject at 24 weeks after the administering. In some methods, the expression or activity of the multidomain therapeutic protein is at least 50% of the expression or activity of the multidomain therapeutic protein at a peak level of expression measured for the subject at two years after the administering. In some methods, the expression or activity of the multidomain therapeutic protein is at least 60% of the expression or activity of the multidomain therapeutic protein at a peak level of expression measured for the subject at 2 years after the administering. In some methods, the expression or activity of the multidomain therapeutic protein is at least 60% of the expression or activity of the multidomain therapeutic protein at a peak level of expression measured for the subject at 24 weeks after the administering.

### C. Dosage and Administration Regimens

[1173] In some embodiments, an amount of a plasma cell depleting agent, e.g., an antigen-binding molecule that binds to B cell maturation antigen (BCMA) and CD3 (e.g., an anti-BCMA×CD3 bispecific antibody), a B cell depleting agent (e.g., anti-CD19 and anti-CD20 antibodies, or a CD20×CD3 antigen-binding molecule (e.g., REGN1979)), an immunoglobulin depleting agent such as a neonatal Fc receptor (FcRn) blocker (e.g., efgartigimod alfa), and/or an immunogen (e.g., nucleic acid construct, nuclease agent or CRISPR/Cas system, e.g., in an immunogenic delivery vehicle) (e.g., an immunogenic delivery vehicle), or pharmaceutical composition thereof which is administered to a subject according to the methods disclosed herein is a therapeutically effective amount. As used herein, the phrase “therapeutically effective amount” means an amount that produces the desired effect for which it is administered. The subject can be from any suitable species, such as eukaryotic or mammalian subjects (e.g., non-human mammalian subject or human subject). A mammal can be, for example, a non-human mammal, a human, a rodent, a rat, a mouse, or a hamster. Other non-human mammals include, for example, non-human primates, e.g., monkeys and apes. The term “non-human” excludes humans. Specific examples include, but are not limited to, humans, rodents, mice, rats, and non-human primates. In a specific example, the subject is a human. The human may be a patient. Likewise, cells can be any suitable type of cell. In a specific example, the cell or cells are a liver cell or liver cells such as a hepatocyte or hepatocytes (e.g., human liver cell(s) or human hepatocyte(s)). In some embodiments, the plasma cell depleting agent (e.g., an anti-BCMA×CD3 bispecific antibody), the B cell depleting agent (e.g., anti-CD19/CD20 antibodies, or a CD20×CD3 antigen-binding molecule (e.g., REGN1979)), the immunoglobulin depleting agent (e.g., efgartigimod alfa), and/or the immunogen (e.g., nucleic acid construct, nuclease agent or CRISPR/Cas system, e.g., in an immunogenic delivery vehicle) (e.g., an immunogenic delivery vehicle), or pharmaceutical composition thereof, is administered to a subject as a weight-based dose. A “weight-based dose” (e.g., a dose in mg/kg) is a dose of the plasma cell depleting agent, the B cell depleting agent, the immunoglobulin depleting agent, and/or the immunogenic delivery vehicle that will change depending on the subject's weight.

[1174] In other embodiments, the plasma cell depleting agent (e.g., an anti-BCMA×CD3 bispecific antibody), the B cell depleting agent (e.g., anti-CD19/CD20 antibodies, or a CD20×CD3 antigen-binding molecule (e.g., REGN1979)), the immunoglobulin depleting agent (e.g., efgartigimod alfa), and/or the immunogen (e.g., nucleic acid construct, nuclease agent or CRISPR/Cas system, e.g., in an immunogenic delivery vehicle) (e.g., an immunogenic delivery vehicle), is administered as a fixed dose. A “fixed dose” (e.g., a dose in mg) means that one dose of the plasma cell depleting agent, the B cell depleting agent, the immunoglobulin depleting agent, and/or the immunogen (e.g., nucleic acid construct, nuclease agent or CRISPR/Cas system, e.g., in an immunogenic delivery vehicle) (e.g., an immunogenic delivery vehicle), is used for all subjects regardless of any specific subject-related factors, such as weight. In one particular embodiment, a fixed dose of a plasma cell depleting agent, a B cell depleting agent, an immunoglobulin depleting agent, and/or an immunogen (e.g., nucleic acid construct, nuclease agent or CRISPR/Cas system, e.g., in an immunogenic delivery vehicle) is based on a predetermined weight or age.

[1175] Typically, a suitable dose of the plasma cell depleting agent and/or the B cell depleting agent and/or the immunoglobulin depleting agent and/or the immunogen (e.g., nucleic acid construct, nuclease agent or CRISPR/Cas system, e.g., in an immunogenic delivery vehicle) can be in the range of about 0.001 to about 200.0 milligram per kilogram body weight of the recipient, generally in the range of about 1 to 50 mg per kilogram body weight. For example, the plasma cell depleting agent and/or the B cell depleting agent and/or the immunoglobulin depleting agent and/or the immunogen (e.g., nucleic acid construct, nuclease agent or CRISPR/Cas system, e.g., in an immunogenic delivery vehicle) can be administered at about 0.1 mg/kg, about 0.2 mg/kg, about 0.5 mg/kg, about 1 mg/kg, about 1.5 mg/kg, about 2 mg/kg, about 3 mg/kg, about 5 mg/kg, about 10 mg/kg, about 15 mg/kg, about 20 mg/kg, about 25 mg/kg, about 30 mg/kg, about 40 mg/kg, or about 50 mg/kg per single dose. Values and ranges intermediate to the recited values are also intended to be part of this disclosure.

[1176] In some embodiments, the plasma cell depleting agent (e.g., an anti-BCMA×CD3 bispecific antibody) is administered at a dose of about 25, about 20 to about 30, about 15 to about 35, about 10 to about 40, about 10 to about 25, about 15 to about 25, about 20 to about 25, about 25 to about 30, about 25 to about 35, or about 25 to about 40 mg/kg. In some embodiments, the plasma cell depleting agent (e.g., an anti-BCMA×CD3 bispecific antibody) is administered at a dose of about 20 to about 30 mg/kg. In some embodiments, the plasma cell depleting agent (e.g., an anti-BCMA×CD3 bispecific antibody) is administered at a dose of about 25 mg/kg.

[1177] In some embodiments, the immunoglobulin depleting agent (e.g., FcRn blocker, such as efgartigimod alfa) is administered at a dose of about 20, about 15 to about 25, about 10 to about 30, about 5 to about 35, about 5 to about 20, about 10 to about 20, about 15 to about 20, about 20 to about 25, about 20 to about 30, or about 20 to about 35 mg/kg. In some embodiments, the immunoglobulin depleting agent (e.g., FcRn blocker, such as efgartigimod alfa) is administered at a dose of about 10 to about 20 mg/kg. In some embodiments, the immunoglobulin depleting agent (e.g., FcRn blocker, such as efgartigimod alfa) is administered at a dose of about 25 to about 24 mg/kg. In some embodiments, the immunoglobulin depleting agent (e.g., FcRn blocker, such as efgartigimod alfa) is administered at a dose of about 20 mg/kg. In some embodiments, the immunoglobulin depleting agent (e.g., FcRn blocker, such as efgartigimod alfa) is administered at a dose of about 10 mg/kg.

[1178] In some embodiments, the immunoglobulin depleting agent (e.g., FcRn blocker, such as efgartigimod alfa) is administered at a dose of about 10 mg/kg weekly for about 1 week, about 2 weeks, about 3 weeks, about 4 weeks, about 5 weeks, about 6 weeks, about 7 weeks, about 8 weeks, about 9 weeks, or about 10 weeks, or more. In some embodiments, the immunoglobulin depleting agent (e.g., FcRn blocker, such as efgartigimod alfa) is administered at a dose of about 10 mg/kg weekly for about 4 weeks. In various embodiments, such as when a dose of an immunoglobulin depleting agent (e.g., FcRn blocker, such as efgartigimod alfa) is administered, e.g., in combination with a plasma cell depleting agent and/or a B cell depleting agent, and optionally, an immunogen (e.g., an immunogenic delivery vehicle such as, e.g., AAV), described herein, the first dose of the immunoglobulin depleting agent may be delayed as compared to the first dose of the plasma cell depleting agent, the first dose of the B cell depleting agent, and/or the first dose of the immunogen. In some embodiments, the first dose of the immunoglobulin depleting agent is delayed by about 5 to about 20 days as compared to first dose of the plasma cell depleting agent, the first dose of the B cell depleting agent, and/or the first dose of the immunogen. In some embodiments, the first dose of the immunoglobulin depleting agent is delayed by about 7 to about 15 days as compared to first dose of the plasma cell depleting agent, the first dose of the B cell depleting agent, and/or the first dose of the immunogen. In some embodiments, the first dose of the immunoglobulin depleting agent is delayed by about 9 to about 11 days as compared to first dose of the plasma cell depleting agent, the first dose of the B cell depleting agent, and/or the first dose of the immunogen. In some embodiments, the first dose of the immunoglobulin depleting agent is delayed by about 10 days as compared to first dose of the plasma cell depleting agent, the first dose of the B cell depleting agent, and/or the first dose of the immunogen. In some embodiments, the first dose of the immunoglobulin depleting agent is delayed by about 11 days as compared to first dose of the plasma cell depleting agent, the first dose of the B cell depleting agent, and/or the first dose of the immunogen. In some embodiments, the first dose of the immunoglobulin depleting agent is delayed by about 12 days as compared to first dose of the plasma cell depleting agent, the first dose of the B cell depleting agent, and/or the first dose of the immunogen. In some embodiments, the first dose of the immunoglobulin depleting agent is delayed by about 13 days as compared to first dose of the plasma cell depleting agent, the first dose of the B cell depleting agent, and/or the first dose of the immunogen. In some embodiments, the first dose of the immunoglobulin depleting agent is delayed by about 14 days as compared to first dose of the plasma cell depleting agent, the first dose of the B cell depleting agent, and/or the first dose of the immunogen.

[1179] In one specific embodiment, the immunoglobulin depleting agent (e.g., FcRn blocker, such as efgartigimod alfa) is administered at a dose of about 10 mg/kg weekly for about 4 weeks and the first dose of the immunoglobulin depleting agent is delayed by about 9 to about 11 days as compared to first dose of the plasma cell depleting agent, the first dose of the B cell depleting agent, and/or the first dose of the immunogen. In some embodiments, the first dose of the immunoglobulin depleting agent is delayed by about 9 days as compared to first dose of the plasma cell depleting agent, the first dose of the B cell depleting agent, and/or the first dose of the immunogen. In some embodiments, the first dose of the immunoglobulin depleting agent is delayed by about 10 days as compared to first dose of the plasma cell depleting agent, the first dose of the B cell depleting agent, and/or the first dose of the immunogen. In some embodiments, the first dose of the immunoglobulin depleting agent is delayed by about 11 days as compared to first dose of the plasma cell depleting agent, the first dose of the B cell depleting agent, and/or the first dose of the immunogen.

[1180] In some embodiments, the B cell depleting agent (e.g., anti-CD19 antibody or anti-CD20 antibody) is administered at a dose of about 20, about 15 to about 25, about 10 to about 30, about 5 to about 35, about 5 to about 20, about 10 to about 20, about 15 to about 20, about 20 to about 25, about 20 to about 30, or about 20 to about 35 mg/kg. In some embodiments, the B cell depleting agent (e.g., anti-CD19 antibody or anti-CD20 antibody) is administered at a dose of about 10 to about 20 mg/kg. In some embodiments, the B cell depleting agent (e.g., anti-CD19 antibody or anti-CD20 antibody) is administered at a dose of about 25 to about 24 mg/kg. In some embodiments, the B cell depleting agent (e.g., anti-CD19 antibody or anti-CD20 antibody) is administered at a dose of about 20 mg/kg.

[1181] In some embodiments, the B cell depleting agent (e.g., anti-CD20×CD3 bispecific antibody) is administered at a dose of about 0.4 to about 0.6, 0.3 to about 0.7, 0.2, to about 0.8, 0.1 to about 0.9, 0.1 to about 0.5, 0.2 to about 0.5, 0.3 to about 0.5, 0.4 to about 0.5, 0.5 to about 0.6, 0.5 to about 0.7, 0.5 to about 0.8, or 0.5 to about 0.9 mg/kg. In some embodiments, the B cell depleting agent (e.g., anti-CD20×CD3 bispecific antibody or anti-CD19 antibody or anti-CD20 antibody) is administered at a dose of about 0.4 to about 0.6 mg/kg. In some embodiments, the B cell depleting agent (e.g., anti-CD20×CD3 bispecific antibody) is administered at a dose of about 0.3 to about 0.7 mg/kg. In some embodiments, the B cell depleting agent (e.g., anti-CD20×CD3 bispecific antibody) is administered at a dose of about 0.5 mg/kg.

[1182] In some embodiments, the plasma cell depleting agent and/or the B cell depleting agent and/or the immunoglobulin depleting agent and/or the immunogen (e.g., nucleic acid construct, nuclease agent or CRISPR/Cas system, e.g., in an immunogenic delivery vehicle) is administered as a fixed dose of between about 5 mg to about 2500 mg. In some embodiments, the plasma cell depleting agent and/or the B cell depleting agent and/or the immunoglobulin depleting agent is administered as a fixed dose of about 5 mg, about 10 mg, about 15 mg, about 20 mg, about 25 mg, about 30 mg, about 50 mg, about 75 mg, about 100 mg, about 125 mg, about 150 mg, about 175 mg, 200 mg, about 225 mg, about 250 mg, about 275 mg, about 300 mg, about 325 mg, about 350 mg, about 375 mg, about 400 mg, about 425 mg, about 450 mg, about 475 mg, about 500 mg, about 525 mg, about 550 mg, about 575 mg, about 600 mg, about 625 mg, about 650 mg, about 675 mg, about 700 mg, about 725 mg, about 750 mg, about 775 mg, about 800 mg, about 825 mg, about 850 mg, about 875 mg, about 900 mg, about 925 mg, about 950 mg, about 975 mg, about 1000 mg, about 1500 mg, about 2000 mg, or about 2500 mg. Values and ranges intermediate to the recited values are also intended to be part of this disclosure.

[1183] In one embodiment, for a plasma cell depleting agent (e.g., an anti-BCMA/anti-CD3 bispecific antibody), a therapeutically effective amount can be from about 0.05 mg to about 500 mg, from about 1 mg to about 500 mg, from about 10 mg to about 450 mg, from about 50 mg to about 400 mg, from about 75 mg to about 350 mg, or from about 100 mg to about 300 mg of the antibody. For example, in various embodiments, the amount of the plasma cell depleting agent is about 0.05 mg, about 0.1 mg, about 1.0 mg, about 1.5 mg, about 2.0 mg, about 5 mg, about 10 mg, about 15 mg, about 20 mg, about 30 mg, about 40 mg, about 50 mg, about 60 mg, about 70 mg, about 80 mg, about 90 mg, about 100 mg, about 110 mg, about 120 mg, about 130 mg, about 140 mg, about 150 mg, about 160 mg, about 170 mg, about 180 mg, about 190 mg, about 200 mg, about 210 mg, about 220 mg, about 230 mg, about 240 mg, about 250 mg, about 260 mg, about 270 mg, about 280 mg, about 290 mg, about 300 mg, about 310 mg, about 320 mg, about 330 mg, about 340 mg, about 350 mg, about 360 mg, about 370 mg, about 380 mg, about 390 mg, about 400 mg, about 410 mg, about 420 mg, about 430 mg, about 440 mg, about 450 mg, about 460 mg, about 470 mg, about 480 mg, about 490 mg, or about 500 mg, of the plasma cell depleting agent.

[1184] In some embodiments, the plasma cell depleting agent (e.g., an anti-BCMA×CD3 bispecific antibody) and/or the B cell depleting agent (e.g., anti-CD19/CD20 antibodies, or a CD20×CD3 antigen-binding molecule (e.g., REGN1979)) and/or the immunoglobulin depleting agent (e.g., efgartigimod alfa) and/or the immunogen (e.g., nucleic acid construct, nuclease agent or CRISPR/Cas system, e.g., in an immunogenic delivery vehicle) (e.g., an immunogenic delivery vehicle) is administered to a subject at a dosing frequency of about four times a week, twice a week, once a week, once every two weeks, once every three weeks, once every four weeks, once every five weeks, once every six weeks, once every eight weeks, once every twelve weeks, or less frequently so long as a therapeutic response is achieved. In some embodiments, the immunogenic delivery vehicle can be administered at a dosing frequency of about four times a week, twice a week, once a week, once every two weeks, once every three weeks, once every four weeks, once every five weeks, once every six weeks, once every eight weeks, once every twelve weeks, or less frequently so long as a therapeutic response is achieved. In some embodiments, the immunogen (e.g., nucleic acid construct, nuclease agent or CRISPR/Cas system, e.g., in an immunogenic delivery vehicle) (e.g., an immunogenic delivery vehicle) can be administered at a dosing frequency of about four times a year, twice a year, once a week, once every two years, once every three years, once every four years, once every five years, once every six years, once every eight years, once every twelve years, or less frequently so long as a therapeutic response is achieved.

[1185] Dose ranges and frequency of administration of an immunogen (e.g., nucleic acid construct, nuclease agent or CRISPR/Cas system, e.g., in an immunogenic delivery vehicle), e.g., an immunogenic delivery vehicle such as a vector (e.g., a viral vector such as an AAV vector) described herein can vary depending on the nature of, and/or the medical condition, as well as parameters of a specific subject and the route of administration used. As a non-limiting example, vector compositions can be administered to a subject at a dose ranging from about 1×10⁵ plaque forming units (pfu) to about 1×10¹⁵ pfu, depending on mode of administration, the route of administration, the nature of the disease and condition of the subject. In some cases, the vector compositions can be administered at a dose ranging from about 1×10⁸ pfu to about 1×10¹⁵ pfu, or from about 1×10¹⁰ pfu to about 1×10¹⁵ pfu, or from about 1×10⁸ pfu to about 1×10¹² pfu. A more accurate dose can also depend on the subject in which it is being administered. For example, a lower dose may be required if the subject is juvenile, and a higher dose may be required if the subject is an adult human subject. In certain embodiments, a more accurate dose can depend on the weight of the subject. In certain embodiments, for example, a juvenile human subject can receive from about 1×10⁸ pfu to about 1×10¹⁰ pfu, while an adult human subject can receive a dose from about 1×10¹⁰ pfu to about 1×10¹² pfu.

[1186] In some embodiments, multiple doses of a plasma cell depleting agent (e.g., an anti-BCMA×CD3 bispecific antibody), a B cell depleting agent (e.g., anti-CD19/CD20 antibodies, or a CD20×CD3 antigen-binding molecule (e.g., REGN1979)), an immunoglobulin depleting agent (e.g., efgartigimod alfa), and/or an immunogen (e.g., nucleic acid construct, nuclease agent or CRISPR/Cas system, e.g., in an immunogenic delivery vehicle) (e.g., an immunogenic delivery vehicle) are administered to a subject over a defined time course. In some embodiments, the methods of the present disclosure comprise sequentially administering to a subject multiple doses of the plasma cell depleting agent (e.g., an anti-BCMA×CD3 bispecific antibody), the B cell depleting agent (e.g., anti-CD19/CD20 antibodies, or a CD20×CD3 antigen-binding molecule (e.g., REGN1979)), the immunoglobulin depleting agent (e.g., efgartigimod alfa), and/or the immunogen (e.g., nucleic acid construct, nuclease agent or CRISPR/Cas system, e.g., in an immunogenic delivery vehicle) (e.g., an immunogenic delivery vehicle).

[1187] In some embodiments, the immunogen (e.g., nucleic acid construct, nuclease agent or CRISPR/Cas system, e.g., in an immunogenic delivery vehicle) (e.g., an immunogenic delivery vehicle such as a vector, e.g., an AAV vector) may be administered in accordance with a repeat dosing regimen wherein the immunogen (e.g., nucleic acid construct, nuclease agent or CRISPR/Cas system, e.g., in an immunogenic delivery vehicle) (e.g., an immunogenic delivery vehicle) may be administered a first time (e.g., in an initial dose) and then re-administered any number of subsequent times thereafter at any amount over the time course of treatment of a subject. For example, the immunogen (e.g., nucleic acid construct, nuclease agent or CRISPR/Cas system, e.g., in an immunogenic delivery vehicle) may be re-administered once, twice, three times, four times, five times, six times, seven times, eight times, nine times, ten times, or more, over the time course of the treatment of a subject which can occur over any number of days, weeks, or years. In some embodiments, when the immunogen (e.g., nucleic acid construct, nuclease agent or CRISPR/Cas system, e.g., in an immunogenic delivery vehicle) (e.g., an immunogenic delivery vehicle) comprises a vector, e.g., a viral vector such as an AAV vector, the vector which is administered first in a repeat dosing regimen may comprise the same vector which is re-administered second in the repeat dosing regimen, or any number of subsequent times thereafter. In some embodiments, when the immunogen (e.g., nucleic acid construct, nuclease agent or CRISPR/Cas system, e.g., in an immunogenic delivery vehicle) (e.g., an immunogenic delivery vehicle) comprises a vector, e.g., a viral vector such as an AAV vector, the vector which is administered first in a repeat dosing regimen may comprise a different vector than is re-administered second in the repeat dosing regimen, or any number of subsequent times thereafter.

[1188] In some embodiments, immunogen (e.g., nucleic acid construct, nuclease agent or CRISPR/Cas system, e.g., in an immunogenic delivery vehicle) (e.g., an immunogenic delivery vehicle), e.g., a viral vector such as an AAV vector, may be administered in accordance with a stepwise dosing regimen. Stepwise dosing of an immunogen (e.g., nucleic acid construct, nuclease agent or CRISPR/Cas system, e.g., in an immunogenic delivery vehicle) can refer to breaking up (i.e., dividing) dosing of the same immunogen (e.g., nucleic acid construct, nuclease agent or CRISPR/Cas system, e.g., in an immunogenic delivery vehicle) over multiple administrations. In some embodiments, the dosing of the same immunogen (e.g., nucleic acid construct, nuclease agent or CRISPR/Cas system, e.g., in an immunogenic delivery vehicle) is broken up once, twice, three times, four times, five times, six times, seven times, eight times, nine times, ten times, or more, over the time course of the treatment of a subject which can occur over any number of days, weeks, or years. In some embodiments, when a stepwise dose regimen is used in the administration of an immunogen (e.g., nucleic acid construct, nuclease agent or CRISPR/Cas system, e.g., in an immunogenic delivery vehicle), e.g., an immunogenic delivery vehicle, e.g., a viral vector such as an AAV vector, the stepwise dosing regimen may result in a gradual increase in therapeutic transgene levels with each administration of the immunogen (e.g., nucleic acid construct, nuclease agent or CRISPR/Cas system, e.g., in an immunogenic delivery vehicle). Without wishing to be bound by theory, a stepwise dosing regimen used in the administration of an immunogen (e.g., nucleic acid construct, nuclease agent or CRISPR/Cas system, e.g., in an immunogenic delivery vehicle) comprising an immunogenic delivery vehicle, e.g., a viral vector such as an AAV vector, can result in enhanced control over transgene expression in a cell and/or subject, since for some transgenes too much expression can result in its own pathology.

[1189] In some embodiments, an immunogen (e.g., nucleic acid construct, nuclease agent or CRISPR/Cas system, e.g., in an immunogenic delivery vehicle) (e.g., an immunogenic delivery vehicle) is administered to a subject in combination with a plasma cell depleting agent, a B cell depleting agent, and/or an immunoglobulin depleting agent. The plasma cell depleting agent and/or the B cell depleting agent and/or the immunoglobulin depleting agent can be administered prior to, simultaneously with, or after the immunogen (e.g., nucleic acid construct, nuclease agent or CRISPR/Cas system, e.g., in an immunogenic delivery vehicle). In one example, the plasma cell depleting agent and/or B cell depleting agent and/or immunoglobulin depleting agent is administered prior to the immunogen (e.g., nucleic acid construct, nuclease agent or CRISPR/Cas system, e.g., in an immunogenic delivery vehicle). In another example, the plasma cell depleting agent and/or B cell depleting agent and/or immunoglobulin depleting agent is administered prior to and after the immunogen (e.g., nucleic acid construct, nuclease agent or CRISPR/Cas system, e.g., in an immunogenic delivery vehicle). In another example, the plasma cell depleting agent and/or B cell depleting agent and/or immunoglobulin depleting agent is administered simultaneously with the immunogen (e.g., nucleic acid construct, nuclease agent or CRISPR/Cas system, e.g., in an immunogenic delivery vehicle). In some embodiments, the plasma cell depleting agent is administered after an immune response has been developed. In some embodiments (e.g., if the patient is immunologically naïve), the plasma cell depleting agent is administered simultaneously with the administration of the immunogen (e.g., to prevent any plasma cells from persisting after being formed). In some embodiments, the plasma cell depleting agent is administered after the administration of the immunogen, e.g., 2-4 days afterwards as plasma cell formation may be limited during the initial lag period. In some embodiments, such as when the immunogen is administered two or more times, the plasma cell depleting agent is administered before and/or between each of the administrations of the immunogen. Administration of the plasma cell depleting agent shortly after the administration of the immunogen may prevent plasma cell formation and persistence elicited by administration of the immunogen to immunologically naïve patients. In some embodiments (e.g., if the patient is immunologically naïve), the B cell depleting agent is administered simultaneously with the administration of the immunogen (e.g., to prevent any B cells from persisting after being formed). In some embodiments, the B cell depleting agent is administered after the administration of the immunogen, e.g., 2-4 days afterwards as B cell formation may be limited during the initial lag period. Administration of the B cell depleting agent shortly after the administration of the immunogen may prevent B cell formation and persistence elicited by administration of the immunogen to immunologically naïve patients. In some embodiments (e.g., if the patient already has pre-existing immunity), the plasma cell depleting agent is administered before the administration of the immunogen. In some embodiments (e.g., if the patient already has pre-existing immunity), the plasma cell depleting agent is administered again within a short period of the first administration. In some embodiments (e.g., if the patient already has pre-existing immunity), the plasma cell depleting agent is continuously administered throughout the pre-dose and re-dose periods (e.g., to clear plasma cells and keep plasma cell levels low). In some embodiments (e.g., if the patient already has pre-existing immunity), the plasma cell depleting agent is administered prophylactically.

[1190] In some embodiments, when the plasma cell depleting agent and/or the B cell depleting agent and/or the immunoglobulin depleting agent is administered prior to, simultaneously with, and/or after the immunogen (e.g., nucleic acid construct, nuclease agent or CRISPR/Cas system, e.g., in an immunogenic delivery vehicle) (e.g., an immunogenic delivery vehicle), the plasma cell depleting agent and/or the B cell depleting agent and/or the immunoglobulin depleting agent is administered once, twice, three times, four times, five times, six times, seven times, eight times, nine times, ten times, eleven times, twelve times, thirteen times, fourteen times, fifteen times, sixteen times, seventeen times, eighteen times, nineteen times, or twenty times or more, prior to, simultaneously with, and/or after the administration of the immunogen (e.g., nucleic acid construct, nuclease agent or CRISPR/Cas system, e.g., in an immunogenic delivery vehicle) (e.g., an immunogenic delivery vehicle). In some embodiments, when an immunogen (e.g., nucleic acid construct, nuclease agent or CRISPR/Cas system, e.g., in an immunogenic delivery vehicle) is administered in accordance with a repeat dosing regimen, a plasma cell depleting agent and/or a B cell depleting agent and/or an immunoglobulin depleting agent may be administered any number of times prior to, simultaneously with, and/or after a first and/or second administration of the immunogen (e.g., nucleic acid construct, nuclease agent or CRISPR/Cas system, e.g., in an immunogenic delivery vehicle), and/or any number of subsequent administrations of the immunogen thereafter. Without wishing to be bound by theory, when a plasma cell depleting agent and/or a B cell depleting agent and/or an immunoglobulin depleting agent is administered to inhibit an immune response to an immunogen (e.g., nucleic acid construct, nuclease agent or CRISPR/Cas system, e.g., in an immunogenic delivery vehicle) in a subject in need thereof, e.g., an anti-drug antibody response to an immunogenic protein, the plasma cell depleting agent and/or the B cell depleting agent and/or the immunoglobulin depleting agent may be co-administered (e.g., administered prior to, simultaneously with, and/or after the immunogen) to prevent the response of the immune system of the subject on each dose of the immunogen (e.g., nucleic acid construct, nuclease agent or CRISPR/Cas system, e.g., in an immunogenic delivery vehicle). As an example, an immunogen comprising a bacterial IgG cleaving enzyme IdeS/imlifidase may be administered to a subject for overcoming AAV pre-existing immunity; however, IdeS itself is immunogenic and can only be administered once. Co-administration of a plasma cell depleting agent and/or a B cell depleting agent and/or an immunoglobulin depleting agent described herein with IdeS/imlifidase can prevent the de novo response to IdeS protein.

[1191] According to certain embodiments of the present disclosure, a plasma cell depleting agent and/or a B cell depleting agent and/or an immunoglobulin depleting agent may be administered to a subject separately from an immunogen (e.g., nucleic acid construct, nuclease agent or CRISPR/Cas system, e.g., in an immunogenic delivery vehicle) (e.g., an immunogenic delivery vehicle) described herein.

[1192] In some embodiments, when a plasma cell depleting agent and/or a B cell depleting agent and/or an immunoglobulin depleting agent and an immunogen (e.g., nucleic acid construct, nuclease agent or CRISPR/Cas system, e.g., in an immunogenic delivery vehicle) (e.g., an immunogenic delivery vehicle) are administered separately, the plasma cell depleting agent and/or the B cell depleting agent and/or the immunoglobulin depleting agent may be administered simultaneously with the administration of the immunogen (e.g., nucleic acid construct, nuclease agent or CRISPR/Cas system, e.g., in an immunogenic delivery vehicle). In some embodiments, the plasma cell depleting agent and/or the B cell depleting agent and/or the immunoglobulin depleting agent is administered one or more times during the administration of the immunogen (e.g., nucleic acid construct, nuclease agent or CRISPR/Cas system, e.g., in an immunogenic delivery vehicle). In some embodiments, the immunogen (e.g., nucleic acid construct, nuclease agent or CRISPR/Cas system, e.g., in an immunogenic delivery vehicle) is administered one or more times during the administration of the plasma cell depleting agent and/or the B cell depleting agent and/or the immunoglobulin depleting agent. In some embodiments, the plasma cell depleting agent is administered after an immune response has been developed. In some embodiments (e.g., if the patient is immunologically naïve), the plasma cell depleting agent is administered simultaneously with the administration of the immunogen (e.g., to prevent any plasma cells from persisting after being formed). In some embodiments, the plasma cell depleting agent is administered after the administration of the immunogen, e.g., 2-4 days afterwards as plasma cell formation may be limited during the initial lag period. In some embodiments, such as when the immunogen is administered two or more times, the plasma cell depleting agent is administered before and/or between each of the administrations of the immunogen. Administration of the plasma cell depleting agent shortly after the administration of the immunogen may prevent plasma cell formation and persistence elicited by administration of the immunogen to immunologically naïve patients. In some embodiments (e.g., if the patient already has pre-existing immunity), the plasma cell depleting agent is administered before the administration of the immunogen. In some embodiments (e.g., if the patient already has pre-existing immunity), the plasma cell depleting agent is administered again within a short period of the first administration. In some embodiments (e.g., if the patient already has pre-existing immunity), the plasma cell depleting agent is continuously administered throughout the pre-dose and re-dose periods (e.g., to clear plasma cells and keep plasma cell levels low). In some embodiments (e.g., if the patient already has pre-existing immunity), the plasma cell depleting agent is administered prophylactically.

[1193] In some embodiments, the immunoglobulin depleting agent is administered after an initial dose of the plasma cell depleting agent. In some embodiments, the immunoglobulin depleting agent is administered after an initial dose of the plasma cell depleting agent and after an initial dose of the B cell depleting agent.

[1194] In some embodiments (e.g., if the patient is immunologically naïve), the B cell depleting agent is administered simultaneously with the administration of the immunogen (e.g., to prevent any B cells from persisting after being formed). In some embodiments, the B cell depleting agent is administered after the administration of the immunogen, e.g., 2-4 days afterwards as B cell formation may be limited during the initial lag period. Administration of the B cell depleting agent shortly after the administration of the immunogen may prevent B cell formation and persistence elicited by administration of the immunogen to immunologically naïve patients. In some embodiments, the B cell depleting agent is administered prior to and after administration of the immunogen (e.g., to deplete existing B cells and then to maintain the depletion thereafter).

[1195] In some embodiments, a B cell depleting agent is administered alone (e.g., without a plasma cell depleting agent). In some embodiments, a B cell depleting agent is administered prior to a plasma cell depleting agent. In some embodiments, a B cell depleting agent is administered simultaneously with a plasma cell depleting agent. In some embodiments, a B cell depleting agent is administered subsequent to a plasma cell depleting agent. In some embodiments, a B cell depleting agent is administered prior to and subsequent to a plasma cell depleting agent. In some embodiments, a B cell depleting agent is administered prior to and simultaneously with a plasma cell depleting agent. In some embodiments, a B cell depleting agent is administered simultaneously with and subsequent to a plasma cell depleting agent. In theory, B cell depletion could be conducted before or after plasma cell depletion with the same effect, provided that B cells remain depleted up until the time of dosing with the immunogen.

[1196] In some embodiments, an immunoglobulin depleting agent is administered subsequent to a plasma cell depleting agent. In some embodiments, an immunoglobulin depleting agent is administered subsequent to a B cell depleting agent. In some embodiments, an immunoglobulin depleting agent is administered subsequent to a plasma cell depleting agent and a B cell depleting agent. For example, if the plasma cell depleting agent is an anti-BCMA×CD3 bispecific antibody, administering the immunoglobulin depleting agent after the plasma cell depleting agent will prevent more rapid clearance of the plasma cell depleting agent. For example, if the B cell depleting agent is an anti-CD20×CD3 bispecific antibody, administering the immunoglobulin depleting agent after the B cell depleting agent will prevent more rapid clearance of the B cell depleting agent. The timing can be affected by what immunoglobulin depleting agent is used. For example, different treatment regimens would be expected for FcRn blockers vs. IgG degrading enzymes (e.g., IdeS). IdeS is an enzyme and therefore acts much more rapidly than FcRn blockade, clearing IgGs within hours to days. For FcRn blockade, several weeks of treatment may be required to fully clear anti-AAV IgGs from circulation.

[1197] In some embodiments, a plasma cell depleting agent and/or a B cell depleting agent and/or an immunoglobulin depleting agent and an immunogen (e.g., an immunogenic delivery vehicle) may be administered separately over a defined time course. In certain embodiments, multiple doses of a plasma cell depleting agent and/or a B cell depleting agent and/or an immunoglobulin depleting agent and/or an immunogen (e.g., nucleic acid construct, nuclease agent or CRISPR/Cas system, e.g., in an immunogenic delivery vehicle) (e.g., an immunogenic delivery vehicle) described herein may be administered to a subject over a defined time course. The methods according to such aspects of the disclosure may comprise sequentially administering to a subject multiple doses of a plasma cell depleting agent and/or a B cell depleting agent and/or an immunoglobulin depleting agent and/or immunogen (e.g., nucleic acid construct, nuclease agent or CRISPR/Cas system, e.g., in an immunogenic delivery vehicle) of the disclosure. In some embodiments, when the plasma cell depleting agent and/or the B cell depleting agent and/or the immunoglobulin depleting agent and immunogen (e.g., nucleic acid construct, nuclease agent or CRISPR/Cas system, e.g., in an immunogenic delivery vehicle) are administered sequentially, the plasma cell depleting agent and/or the B cell depleting agent and/or the immunoglobulin depleting agent can be administered before and/or in between each of the administrations of the immunogen(s) (e.g., nucleic acid construct, nuclease agent or CRISPR/Cas system, e.g., in an immunogenic delivery vehicle). As used herein, “sequentially administering” means that each dose of the plasma cell depleting agent, the B cell depleting agent, the immunoglobulin depleting agent, and/or the immunogenic delivery vehicle, is administered to the subject at a different point in time, e.g., on different days separated by a predetermined interval (e.g., hours, days, weeks, months, or years). In some embodiments, the methods of the disclosure comprise sequentially administering to the subject a single initial dose of the plasma cell depleting agent and/or the B cell depleting agent and/or the immunoglobulin depleting agent and/or the immunogen (e.g., nucleic acid construct, nuclease agent or CRISPR/Cas system, e.g., in an immunogenic delivery vehicle), followed by one or more secondary doses of the plasma cell depleting agent and/or the B cell depleting agent and/or the immunoglobulin depleting agent and/or the immunogen (e.g., nucleic acid construct, nuclease agent or CRISPR/Cas system, e.g., in an immunogenic delivery vehicle) (e.g., an immunogenic delivery vehicle), and optionally followed by one or more tertiary doses of the plasma cell depleting agent and/or the B cell depleting agent and/or the immunoglobulin depleting agent and/or the immunogen (e.g., nucleic acid construct, nuclease agent or CRISPR/Cas system, e.g., in an immunogenic delivery vehicle).

[1198] The terms “initial dose,” “secondary dose(s),” and “tertiary dose(s)” refer to the temporal sequence of administration of the plasma cell depleting agent, the B cell depleting agent, the immunoglobulin depleting agent, and/or the immunogen (e.g., nucleic acid construct, nuclease agent or CRISPR/Cas system, e.g., in an immunogenic delivery vehicle) (e.g., an immunogenic delivery vehicle). Thus, the “initial dose” is the dose which is administered at the beginning of the treatment regimen (also referred to as the “loading dose”); the “secondary doses” are the doses which are administered after the initial dose; and the “tertiary doses” are the doses which are administered after the secondary doses. In some embodiments, the initial, secondary, and tertiary doses may all contain the same amount of the plasma cell depleting agent, the B cell depleting agent, the immunoglobulin depleting agent, and/or the immunogen (e.g., nucleic acid construct, nuclease agent or CRISPR/Cas system, e.g., in an immunogenic delivery vehicle) but may differ from one another in terms of frequency of administration. In some embodiments, the amount of the plasma cell depleting agent, B cell depleting agent, immunoglobulin depleting agent, and/or the immunogen (e.g., nucleic acid construct, nuclease agent or CRISPR/Cas system, e.g., in an immunogenic delivery vehicle) contained in the initial, secondary and/or tertiary doses varies from one another (e.g., adjusted up or down as appropriate) during the course of treatment. In certain embodiments, one or more (e.g., 1, 2, 3, 4, or 5) doses are administered at the beginning of the treatment regimen as “loading doses” followed by subsequent doses that are administered on a less frequent basis (e.g., “maintenance doses”). In some embodiments, the initial dose and the one or more secondary doses each contain the same amount of the plasma cell depleting agent, the B cell depleting agent, the immunoglobulin depleting agent, and/or the immunogen (e.g., nucleic acid construct, nuclease agent or CRISPR/Cas system, e.g., in an immunogenic delivery vehicle). In other embodiments, the initial dose comprises a first amount of the plasma cell depleting agent, the B cell depleting agent, the immunoglobulin depleting agent, and/or the immunogen (e.g., nucleic acid construct, nuclease agent or CRISPR/Cas system, e.g., in an immunogenic delivery vehicle) (e.g., an immunogenic delivery vehicle) and the one or more secondary doses each comprise a second amount of the plasma cell depleting agent, the B cell depleting agent, the immunoglobulin depleting agent, and/or the immunogen (e.g., nucleic acid construct, nuclease agent or CRISPR/Cas system, e.g., in an immunogenic delivery vehicle). For example, the first amount of the plasma cell depleting agent, the B cell depleting agent, the immunoglobulin depleting agent, and/or the immunogen (e.g., nucleic acid construct, nuclease agent or CRISPR/Cas system, e.g., in an immunogenic delivery vehicle) (e.g., an immunogenic delivery vehicle) can be 1.5×, 2×, 2.5×, 3×, 3.5×, 4×, 5× or more than the second amount of the plasma cell depleting agent, the B cell depleting agent, the immunoglobulin depleting agent, and/or the immunogen (e.g., nucleic acid construct, nuclease agent or CRISPR/Cas system, e.g., in an immunogenic delivery vehicle).

[1199] In some embodiments, each secondary and/or tertiary dose is administered 1 to 14 (e.g., 1, 1½, 2, 2½, 3, 3½, 4, 4½, 5, 5½, 6, 6½, 7, 7½, 8, 8½, 9, 9½, 10, 10½, 11, 11½, 12, 12½, 13, 13½, 14, 14½, or more) weeks after the immediately preceding dose. The phrase “the immediately preceding dose,” as used herein, means, in a sequence of multiple administrations, the dose of the plasma cell depleting agent, the B cell depleting agent, the immunoglobulin depleting agent, and/or the immunogen (e.g., nucleic acid construct, nuclease agent or CRISPR/Cas system, e.g., in an immunogenic delivery vehicle) (e.g., an immunogenic delivery vehicle) that is administered to a subject prior to the administration of the very next dose in the sequence with no intervening doses.

[1200] The methods of the disclosure may comprise administering to a subject any number of secondary and/or tertiary doses of a plasma cell depleting agent, a B cell depleting agent, an immunoglobulin depleting agent, and/or an immunogen (e.g., nucleic acid construct, nuclease agent or CRISPR/Cas system, e.g., in an immunogenic delivery vehicle) (e.g., an immunogenic delivery vehicle). For example, in certain embodiments, only a single secondary dose is administered to the subject. In other embodiments, two or more (e.g., 2, 3, 4, 5, 6, 7, 8, or more) secondary doses are administered to the subject. Likewise, in certain embodiments, only a single tertiary dose is administered to the subject. In other embodiments, two or more (e.g., 2, 3, 4, 5, 6, 7, 8, or more) tertiary doses are administered to the subject.

[1201] In some embodiments involving multiple secondary doses, each secondary dose is administered at the same frequency as the other secondary doses. For example, each secondary dose may be administered to the subject 1, 2, 3, or 4 weeks after the immediately preceding dose. Similarly, in some embodiments involving multiple tertiary doses, each tertiary dose is administered at the same frequency as the other tertiary doses. Alternatively, the frequency at which the secondary and/or tertiary doses are administered to a subject can vary over the course of the treatment regimen. The frequency of administration may also be adjusted during the course of treatment by a physician depending on the needs of the individual subject following clinical examination.

[1202] In some embodiments, the secondary and/or tertiary doses of an immunogen (e.g., nucleic acid construct, nuclease agent or CRISPR/Cas system, e.g., in an immunogenic delivery vehicle) (e.g., an immunogenic delivery vehicle) comprising a viral particle or vector (e.g., a viral vector such as an AAV vector) administered to the subject is of the same or similar viral origin as the initial dose. In some embodiments, the secondary and/or tertiary doses of an immunogen (e.g., nucleic acid construct, nuclease agent or CRISPR/Cas system, e.g., in an immunogenic delivery vehicle) (e.g., an immunogenic delivery vehicle) comprising a viral particle or vector administered to the subject is of a different viral origin then the initial dose.

[1203] In some embodiments, the subsequently administered viral vector is administered via the same administration route as the originally administered viral vector. In some embodiments, the subsequently administered viral vector is administered via a different administration route from the originally administered viral vector.

[1204] In some embodiments, when a plasma cell depleting agent and/or a B cell depleting agent and/or an immunoglobulin depleting agent and/or an immunogen (e.g., nucleic acid construct, nuclease agent or CRISPR/Cas system, e.g., in an immunogenic delivery vehicle) (e.g., an immunogenic delivery vehicle) herein are sequentially administered, the immunogen (e.g., nucleic acid construct, nuclease agent or CRISPR/Cas system, e.g., in an immunogenic delivery vehicle) (e.g., an immunogenic delivery vehicle) may be administered as a first component of the dosing regimen and the plasma cell depleting agent, B cell depleting agent, and/or immunoglobulin depleting agent may be administered as a second component of the dosing regimen (i.e., the immunogen (e.g., nucleic acid construct, nuclease agent or CRISPR/Cas system, e.g., in an immunogenic delivery vehicle) may be administered before the plasma cell depleting agent and/or the B cell depleting agent and/or the immunoglobulin depleting agent). In some embodiments, the immunogen (e.g., nucleic acid construct, nuclease agent or CRISPR/Cas system, e.g., in an immunogenic delivery vehicle) may be administered as a second component of the dosing regimen and the plasma cell depleting agent and/or the B cell depleting agent and/or the immunoglobulin depleting agent may be administered as a first component of a dosing regimen (i.e., the immunogen (e.g., nucleic acid construct, nuclease agent or CRISPR/Cas system, e.g., in an immunogenic delivery vehicle) may be administered after the plasma cell depleting agent and/or the B cell depleting agent and/or the immunoglobulin depleting agent). In some embodiments, an immunogen (e.g., nucleic acid construct, nuclease agent or CRISPR/Cas system, e.g., in an immunogenic delivery vehicle) and a plasma cell depleting agent and/or a B cell depleting agent and/or an immunoglobulin depleting agent may be sequentially administered, in either of the above-described orders, with variable time intervals between administration. For example, the time interval between administration of the immunogen (e.g., nucleic acid construct, nuclease agent or CRISPR/Cas system, e.g., in an immunogenic delivery vehicle) (e.g., an immunogenic delivery vehicle) and the plasma cell depleting agent and/or B cell depleting agent and/or immunoglobulin depleting agent may be at least about 30 seconds, at least about 35 seconds, at least about 40 seconds, at least about 45 seconds, at least about 50 seconds, at least about 55 seconds, at least about 1 minute, at least about 2 minutes, at least about 5 minutes, at least about 10 minutes, at least about 20 minutes, at least about 30 minutes, at least about 40 minutes, at least about 50 minutes, at least about 1 hour, at least about 2 hours, at least about 3 hours, at least about 4 hours, at least about 5 hours, at least about 6 hours, at least about 7 hours, at least about 8 hours, at least about 9 hours, at least about 10 hours, at least about 10 to 12 hours, at least about 12 to 14 hours, at least about 14 to 16 hours, at least about 16 to 18 hours, at least about 18 to 20 hours, at least about 20 to 22 hours, at least about 22 to 24 hours, at least about 1 day, at least about 2 days, at least about 3 days, at least about 4 days, at least about 5 days, at least about 6 days, at least about 7 days, at least about 8 days, at least about 9 days, at least about 10 days, at least about 10 to 12 days, at least about 12 to 14 days, at least about 14 to 16 days, at least about 16 to 18 days, at least about 18 to 20 days, at least about 20 to 22 days, at least about 22 to 24 days, at least about 24 to 26 days, at least about 28 days, at least about 29 days, at least about 30 days, at least about 31 days, at least about 1 month, at least about 2 months, at least about 3 months, at least about 4 months, at least about 5 months, at least about 6 months, at least about 7 months, at least about 8 months, at least about 9 months, at least about 10 months, at least about 11 months, at least about 1 year, at least about 2 years, at least about 3 years, at least about 4 years, at least about 5 years, at least about 6 years, at least about 7 years, at least about 8 years, at least about 9 years, at least about 10 years, or more.

[1205] Any of the above methods can further comprise any of various subsequent administration steps described herein. The subsequent administration step can comprise, for example, administering the plasma cell depleting agent and/or the B cell depleting agent and/or the immunoglobulin depleting agent and an immunogen (e.g., nucleic acid construct, nuclease agent or CRISPR/Cas system, e.g., in an immunogenic delivery vehicle) (e.g., an immunogenic delivery vehicle) to the subject one or more subsequent times until a desired level of expression and/or activity of the polypeptide of interest is achieved in the subject.

[1206] The subsequent administration step can be, for example, at least about 1 week, at least about 2 weeks, at least about 3 weeks, at least about 4 weeks, at least about 5 weeks, at least about 6 weeks, at least about 7 weeks, at least about 8 weeks, at least about 9 weeks, at least about 10 weeks, at least about 11 weeks, or at least about 12 weeks after the initial dosing (e.g., at least about 4 weeks after the initial dosing) or about 4 weeks to about 12 weeks, about 4 weeks to about 13 weeks, about 4 weeks to about 14 weeks, about 4 weeks to about 15 weeks, about 4 weeks to about 16 weeks, about 1 week to about 12 weeks, about 2 weeks to about 12 weeks, about 3 weeks to about 12 weeks, about 1 week to about 15 weeks, about 2 week to about 14 weeks, or about 3 weeks to about 13 weeks after the initial dosing (e.g., about 4 weeks to about 12 weeks after the initial dosing).

[1207] The subsequent administration step can be, for example, at least about 1 week, at least about 2 weeks, at least about 3 weeks, at least about 4 weeks, at least about 5 weeks, at least about 6 weeks, at least about 7 weeks, at least about 8 weeks, at least about 9 weeks, at least about 10 weeks, at least about 11 weeks, or at least about 12 weeks after the initial dosing (e.g., at least about 4 weeks after the initial dosing) or about 4 weeks to about 12 weeks, about 4 weeks to about 13 weeks, about 4 weeks to about 14 weeks, about 4 weeks to about 15 weeks, about 4 weeks to about 16 weeks, about 1 week to about 12 weeks, about 2 weeks to about 12 weeks, about 3 weeks to about 12 weeks, about 1 week to about 15 weeks, about 2 week to about 14 weeks, or about 3 weeks to about 13 weeks after the initial dosing (e.g., about 4 weeks to about 12 weeks after the initial dosing).

[1208] The subsequent administration step can comprise, for example, administering a second immunogen (e.g., nucleic acid construct, nuclease agent or CRISPR/Cas system, e.g., in an immunogenic delivery vehicle) (e.g., an immunogenic delivery vehicle), e.g. an immune delivery vehicle comprising, e.g., a vector comprising a coding sequence for a second polypeptide of interest (e.g., that is different from a first polypeptide of interest encoded by a first vector administered in an initial administration step) to the subject one or more subsequent times until a desired level of expression and/or activity of the polypeptide of interest is achieved in the subject.

[1209] The subsequent administration step can be, for example, at least about 1 week, at least about 2 weeks, at least about 3 weeks, at least about 4 weeks, at least about 5 weeks, at least about 6 weeks, at least about 7 weeks, at least about 8 weeks, at least about 9 weeks, at least about 10 weeks, at least about 11 weeks, or at least about 12 weeks after the initial dosing (e.g., at least about 4 weeks after the initial dosing) or about 4 weeks to about 12 weeks, about 4 weeks to about 13 weeks, about 4 weeks to about 14 weeks, about 4 weeks to about 15 weeks, about 4 weeks to about 16 weeks, about 1 week to about 12 weeks, about 2 weeks to about 12 weeks, about 3 weeks to about 12 weeks, about 1 week to about 15 weeks, about 2 week to about 14 weeks, or about 3 weeks to about 13 weeks after the initial dosing (e.g., about 4 weeks to about 12 weeks after the initial dosing).

[1210] In some embodiments, the present disclosure provides a method for increasing effectiveness of a subsequently administered viral vector following an originally administered viral vector in a subject in need thereof, comprising administering to the subject an effective amount of a plasma cell depleting agent, a B cell depleting agent, and/or an immunoglobulin depleting agent, and the subsequently administered viral vector is of the same or similar viral origin as the originally administered viral vector. In some embodiments, the present disclosure contemplates a method for increasing effectiveness of a subsequently administered viral vector following an originally administered viral vector in a subject in need thereof, comprising administering to the subject an effective amount of a plasma cell depleting agent, a B cell depleting agent, and/or an immunoglobulin depleting agent, and the subsequently administered viral vector is of the same or similar viral origin as the originally administered viral vector. In another aspect, provided herein is a method for increasing effectiveness of a subsequently administered viral vector following an originally administered viral vector in a subject in need thereof, the method comprising administering to the subject an effective amount of an anti-CD20×CD3 bispecific antibody or a functional fragment thereof, wherein the subsequently administered viral vector is of the same or similar viral origin as the originally administered viral vector. In some embodiments, the subject does not have a pre-existing immunity against the viral vectors. In some embodiments, the subject does not have a pre-existing immunity against the nucleic acid construct, the polypeptide of interest encoded by the nucleic acid construct, the nuclease agent or one or more nucleic acids encoding the nuclease agent, or a delivery vehicle for the nucleic acid construct, the nuclease agent, or the one or more nucleic acids encoding the nuclease agent.

[1211] In some embodiments, the subsequently administered viral vector is administered via the same administration route as the originally administered viral vector.

[1212] In some embodiments, the subsequently administered viral vector is administered via a different administration route from the originally administered viral vector.

[1213] In some embodiments, the plasma cell depleting agent is administered before the administration of the subsequently administered viral vector(s).

[1214] In some embodiments, the plasma cell depleting agent is administered simultaneously with the administration of the subsequently administered viral vector(s).

[1215] In some embodiments, the subsequently administered viral vectors are administered two or more times and the plasma cell depleting agent is administered before and/or between each of the administrations of the subsequently administered viral vectors.

[1216] In some embodiments, the plasma cell depleting agent, the B cell depleting agent, and/or the immunoglobulin depleting agent is administered before the administration of the viral vector(s). In some embodiments, the anti-CD20×CD3 bispecific antibody or functional fragment thereof is administered before the administration of the originally administered viral vector to the subject.

[1217] In some embodiments, the plasma cell depleting agent, the B cell depleting agent, and/or the immunoglobulin depleting agent is administered simultaneously with the administration of the viral vector(s). In some embodiments, the anti-CD20×CD3 bispecific antibody or functional fragment thereof is administered simultaneously with the administration of the originally administered viral vector and/or subsequently administered viral vector to the subject.

[1218] In some embodiments, the plasma cell depleting agent, the B cell depleting agent, and/or the immunoglobulin depleting agent is administered after the administration of the viral vector(s). In some embodiments, the anti-CD20×CD3 bispecific antibody or functional fragment thereof is administered after the administration of the originally administered viral vector but before administering the subsequently administered viral vector to the subject. In some embodiments, the anti-CD20×CD3 bispecific antibody or functional fragment thereof is administered after the administration of the subsequently administered viral vector to the subject.

[1219] In some embodiments, the viral vectors are administered two or more times and the plasma cell depleting agent, the B cell depleting agent, and/or the immunoglobulin depleting agent is administered before and/or between each of the administrations of the viral vectors. In some embodiments, the anti-CD20×CD3 bispecific antibody or functional fragment thereof is administered before and/or between each of the administrations of the viral vectors to the subject.

[1220] In some embodiments, the immunogen re-administration occurs via the same administration route as its prior administration. In some embodiments, the immunogen re-administration occurs via a different administration route than its prior administration. In some embodiments, the plasma cell depleting agent, the B cell depleting agent, and/or the immunoglobulin depleting agent is administered before the administration of the immunogen. In some embodiments, the anti-CD20×CD3 bispecific antibody or functional fragment thereof is administered before the administration of the immunogen to the subject. In some embodiments, the anti-CD20×CD3 bispecific antibody or functional fragment thereof is administered before the administration of the immunogenic delivery vehicle to the subject. In some embodiments, the plasma cell depleting agent, the B cell depleting agent, and/or the immunoglobulin depleting agent is administered simultaneously with the administration of the immunogen. In some embodiments, the anti-CD20×CD3 bispecific antibody or functional fragment thereof is administered simultaneously with the administration of the immunogen to the subject. In some embodiments, the anti-CD20×CD3 bispecific antibody or functional fragment thereof is administered simultaneously with the administration of the immunogenic delivery vehicle to the subject. In some embodiments, the plasma cell depleting agent, the B cell depleting agent, and/or the immunoglobulin depleting agent is administered after the administration of the immunogen. In some embodiments, the anti-CD20×CD3 bispecific antibody or functional fragment thereof is administered after the administration of the immunogen to the subject. In some embodiments, the anti-CD20×CD3 bispecific antibody or functional fragment thereof is administered after the administration of the immunogenic delivery vehicle to the subject. In some embodiments, the immunogen is administered two or more times and the plasma cell depleting agent, the B cell depleting agent, and/or the immunoglobulin depleting agent is administered before and/or between each of the administrations of the immunogen. In some embodiments, the immunogen is administered to the subject two or more times and the anti-CD20×CD3 bispecific antibody or functional fragment thereof is administered before and/or between each of the administrations of the immunogen. In some embodiments, the immunogenic delivery vehicle is administered to the subject two or more times and the anti-CD20×CD3 bispecific antibody or functional fragment thereof is administered before and/or between each of the administrations of the immunogenic delivery vehicle. In some embodiments, the plasma cell depleting agent is administered after an immune response has been developed. In some embodiments (e.g., if the patient is immunologically naïve), the plasma cell depleting agent is administered simultaneously with the administration of the immunogen (e.g., to prevent any plasma cells from persisting after being formed). In some embodiments, the plasma cell depleting agent is administered after the administration of the immunogen, e.g., 2-4 days afterwards as plasma cell formation may be limited during the initial lag period. In some embodiments, such as when the immunogen is administered two or more times, the plasma cell depleting agent is administered before and/or between each of the administrations of the immunogen. Administration of the plasma cell depleting agent shortly after the administration of the immunogen may prevent plasma cell formation and persistence elicited by administration of the immunogen to immunologically naïve patients. In some embodiments (e.g., if the patient is immunologically naïve), the B cell depleting agent is administered simultaneously with the administration of the immunogen (e.g., to prevent any B cells from persisting after being formed). In some embodiments, the B cell depleting agent is administered after the administration of the immunogen (e.g., 2-4 days afterwards as B cell formation may be limited during the initial lag period). Administration of the B cell depleting agent shortly after the administration of the immunogen may prevent B cell formation and persistence elicited by administration of the immunogen to immunologically naïve patients. In some embodiments (e.g., if the patient already has pre-existing immunity), the plasma cell depleting agent is administered before the administration of the immunogen. In some embodiments (e.g., if the patient already has pre-existing immunity), the plasma cell depleting agent is administered again within a short period of the first administration. In some embodiments (e.g., if the patient already has pre-existing immunity), the plasma cell depleting agent is continuously administered throughout the pre-dose and re-dose periods (e.g., to clear plasma cells and keep plasma cell levels low). In some embodiments (e.g., if the patient already has pre-existing immunity), the plasma cell depleting agent is administered prophylactically.

[1221] In any of the above methods, the plasma cell depleting agent and/or the B cell depleting agent and/or the immunoglobulin depleting agent can be administered simultaneously with the immunogen (e.g., nucleic acid construct, nuclease agent or CRISPR/Cas system, e.g., in an immunogenic delivery vehicle) (e.g., an immunogenic delivery vehicle) or not simultaneously (e.g., sequentially in any combination). For example, in a method comprising administering a composition comprising a plasma cell depleting agent and/or a B cell depleting agent and/or an immunoglobulin depleting agent and an immunogen (e.g., nucleic acid construct, nuclease agent or CRISPR/Cas system, e.g., in an immunogenic delivery vehicle), they can be administered separately (e.g., the plasma cell depleting agent and/or the B cell depleting agent and/or the immunoglobulin depleting agent separately from the immunogen (e.g., nucleic acid construct, nuclease agent or CRISPR/Cas system, e.g., in an immunogenic delivery vehicle)). For example, the plasma cell depleting agent and/or B cell depleting agent and/or immunoglobulin depleting agent can be administered prior to the immunogen (e.g., nucleic acid construct, nuclease agent or CRISPR/Cas system, e.g., in an immunogenic delivery vehicle), subsequent to the immunogen (e.g., nucleic acid construct, nuclease agent or CRISPR/Cas system, e.g., in an immunogenic delivery vehicle), prior to and subsequent to the immunogen (e.g., nucleic acid construct, nuclease agent or CRISPR/Cas system, e.g., in an immunogenic delivery vehicle), or at the same time as immunogen (e.g., nucleic acid construct, nuclease agent or CRISPR/Cas system, e.g., in an immunogenic delivery vehicle). In some embodiments, the plasma cell depleting agent is administered after an immune response has been developed. In some embodiments (e.g., if the patient is immunologically naïve), the plasma cell depleting agent is administered simultaneously with the administration of the immunogen (e.g., to prevent any plasma cells from persisting after being formed). In some embodiments, the plasma cell depleting agent is administered after the administration of the immunogen (e.g., 2-4 days afterwards as plasma cell formation may be limited during the initial lag period). Administration of the plasma cell depleting agent shortly after the administration of the immunogen may prevent plasma cell formation and persistence elicited by administration of the immunogen to immunologically naïve patients. In some embodiments (e.g., if the patient already has pre-existing immunity), the plasma cell depleting agent is administered before the administration of the immunogen. In some embodiments (e.g., if the patient already has pre-existing immunity), the plasma cell depleting agent is administered again within a short period of the first administration. In some embodiments (e.g., if the patient already has pre-existing immunity), the plasma cell depleting agent is continuously administered throughout the pre-dose and re-dose periods (e.g., to clear plasma cells and keep plasma cell levels low). In some embodiments (e.g., if the patient already has pre-existing immunity), the plasma cell depleting agent is administered prophylactically.

[1222] In some embodiments, the plasma cell depleting agent and/or the B cell depleting agent and/or the immunoglobulin depleting agent can be administered about 1 hour to about 48 hours, about 1 hour to about 24 hours, about 1 hour to about 12 hours, about 1 hour to about 6 hours, about 1 hour to about 2 hours, about 2 hours to about 48 hours, about 2 hours to about 24 hours, about 2 hours to about 12 hours, about 2 hours to about 6 hours, about 3 hours to about 48 hours, about 6 hours to about 48 hours, about 12 hours to about 48 hours, or about 24 hours to about 48 hours prior to and/or subsequent to administration of the immunogen (e.g., nucleic acid construct, nuclease agent or CRISPR/Cas system, e.g., in an immunogenic delivery vehicle).

[1223] In one example, the plasma cell depleting agent and/or B cell depleting agent and/or immunoglobulin depleting agent is administered about 4 hours, about 8 hours, about 12 hours, about 18 hours, about 1 day, about 2 days, about 3 days, about 4 days, about 5 days, about 6 days, or about 1 week prior to administering the immunogen (e.g., nucleic acid construct, nuclease agent or CRISPR/Cas system, e.g., in an immunogenic delivery vehicle) (e.g., an immunogenic delivery vehicle). In another example, the plasma cell depleting agent and/or B cell depleting agent and/or immunoglobulin depleting agent is administered at least about 4 hours, at least about 8 hours, at least about 12 hours, at least about 18 hours, at least about 1 day, at least about 2 days, at least about 3 days, at least about 4 days, at least about 5 days, at least about 6 days, or at least about 1 week prior to administering the immunogen (e.g., nucleic acid construct, nuclease agent or CRISPR/Cas system, e.g., in an immunogenic delivery vehicle) (e.g., an immunogenic delivery vehicle). In another example, the plasma cell depleting agent and/or B cell depleting agent and/or immunoglobulin depleting agent is administered about 4 hours to about 24 hours, about 4 hours to about 12 hours, about 4 hours to about 8 hours, about 8 hours to about 24 hours, about 12 hours to about 24 hours, about 1 day to about 7 days, about 1 day to about 6 days, about 1 day to about 5 days, about 1 day to about 4 days, about 1 day to about 3 days, about 1 day to about 2 days, about 2 days to about 7 days, about 3 days to about 7 days, about 4 days to about 7 days, about 5 days to about 7 days, about 6 days to about 7 days, or about 1 day to about 3 days prior to and/or subsequent to administering the immunogen (e.g., nucleic acid construct, nuclease agent or CRISPR/Cas system, e.g., in an immunogenic delivery vehicle) (e.g., an immunogenic delivery vehicle).

[1224] In one example, the plasma cell depleting agent and/or the B cell depleting agent and/or the immunoglobulin depleting agent is administered about 4 hours, about 8 hours, about 12 hours, about 18 hours, about 1 day, about 2 days, about 3 days, about 4 days, about 5 days, about 6 days, or about 1 week prior to and subsequent to administering the immunogen (e.g., nucleic acid construct, nuclease agent or CRISPR/Cas system, e.g., in an immunogenic delivery vehicle) (e.g., an immunogenic delivery vehicle). In another example, the plasma cell depleting agent and/or the B cell depleting agent and/or the immunoglobulin depleting agent is administered at least about 4 hours, at least about 8 hours, at least about 12 hours, at least about 18 hours, at least about 1 day, at least about 2 days, at least about 3 days, at least about 4 days, at least about 5 days, at least about 6 days, or at least about 1 week prior to and subsequent to administering immunogen (e.g., nucleic acid construct, nuclease agent or CRISPR/Cas system, e.g., in an immunogenic delivery vehicle) (e.g., an immunogenic delivery vehicle). In another example, the plasma cell depleting agent and/or the B cell depleting agent and/or the immunoglobulin depleting agent is administered about 4 hours to about 24 hours, about 4 hours to about 12 hours, about 4 hours to about 8 hours, about 8 hours to about 24 hours, about 12 hours to about 24 hours, about 1 day to about 7 days, about 1 day to about 6 days, about 1 day to about 5 days, about 1 day to about 4 days, about 1 day to about 3 days, about 1 day to about 2 days, about 2 days to about 7 days, about 3 days to about 7 days, about 4 days to about 7 days, about 5 days to about 7 days, about 6 days to about 7 days, or about 1 day to about 3 days prior to and subsequent to administering the immunogen (e.g., nucleic acid construct, nuclease agent or CRISPR/Cas system, e.g., in an immunogenic delivery vehicle) (e.g., an immunogenic delivery vehicle).

[1225] In one example, the plasma cell depleting agent and/or B cell depleting agent and/or immunoglobulin depleting agent is administered about 4 hours, about 8 hours, about 12 hours, about 18 hours, about 1 day, about 2 days, about 3 days, about 4 days, about 5 days, about 6 days, or about 1 week after administering the immunogen (e.g., nucleic acid construct, nuclease agent or CRISPR/Cas system, e.g., in an immunogenic delivery vehicle) (e.g., an immunogenic delivery vehicle). In another example, the plasma cell depleting agent and/or B cell depleting agent and/or immunoglobulin depleting agent is administered at least about 4 hours, at least about 8 hours, at least about 12 hours, at least about 18 hours, at least about 1 day, at least about 2 days, at least about 3 days, at least about 4 days, at least about 5 days, at least about 6 days, or at least about 1 week after administering the immunogen (e.g., nucleic acid construct, nuclease agent or CRISPR/Cas system, e.g., in an immunogenic delivery vehicle) (e.g., an immunogenic delivery vehicle). In another example, the plasma cell depleting agent and/or B cell depleting agent and/or immunoglobulin depleting agent is administered about 4 hours to about 24 hours, about 4 hours to about 12 hours, about 4 hours to about 8 hours, about 8 hours to about 24 hours, about 12 hours to about 24 hours, about 1 day to about 7 days, about 1 day to about 6 days, about 1 day to about 5 days, about 1 day to about 4 days, about 1 day to about 3 days, about 1 day to about 2 days, about 2 days to about 7 days, about 3 days to about 7 days, about 4 days to about 7 days, about 5 days to about 7 days, about 6 days to about 7 days, or about 1 day to about 3 days after administering the immunogen (e.g., nucleic acid construct, nuclease agent or CRISPR/Cas system, e.g., in an immunogenic delivery vehicle) (e.g., an immunogenic delivery vehicle).

[1226] In one example, the plasma cell depleting agent and/or B cell depleting agent and/or immunoglobulin depleting agent (e.g., the plasma cell depleting agent) is administered within about 6 months after the nucleic acid construct, optionally wherein the nucleic acid construct is in a viral vector, and the plasma cell depleting agent is administered if the viral vector is still present in the subject. In one example, the immunogen (e.g., nucleic acid construct or AAV) is administered within about 3 months, within about 2 months, within about 7 weeks, within about 6 weeks, within about 5 weeks, within about 4 weeks, within about 3 weeks, or within about 2 weeks after an initial dose of the plasma cell depleting agent and/or B cell depleting agent and/or immunoglobulin depleting agent (e.g., the plasma cell depleting agent). In one example, the immunogen (e.g., nucleic acid construct or AAV) is administered at least about 2 weeks, at least about 3 weeks, at least about 4 weeks, at least about 5 weeks, at least about 6 weeks, at least about 7 weeks, at least about 2 months, or at least about 3 months after an initial dose of the plasma cell depleting agent and/or B cell depleting agent and/or immunoglobulin depleting agent (e.g., the plasma cell depleting agent). In one example, the immunogen (e.g., nucleic acid construct or AAV) is administered within about 2 weeks to about 3 months, within about 2 weeks to about 2 months, within about 2 weeks to about 7 weeks, within about 2 weeks to about 6 weeks, within about 2 weeks to about 5 weeks, within about 2 weeks to about 4 weeks, within about 2 weeks to about 3 weeks, within about 2 months to about 3 months, within about 7 weeks to about 3 months, within about 6 weeks to about 3 months, within about 5 weeks to about 3 months, within about 4 weeks to about 3 months, within about 3 weeks to about 3 months, or within about 2 weeks to about 3 months after an initial dose of the plasma cell depleting agent and/or B cell depleting agent and/or immunoglobulin depleting agent (e.g., the plasma cell depleting agent). In one example, the immunogen (e.g., nucleic acid construct or AAV) is administered within about 2 weeks to about 7 weeks, within about 3 weeks to about 6 weeks, within about 4 weeks to about 5 weeks, within about 3 weeks to about 7 weeks, within about 4 weeks to about 7 weeks, within about 5 weeks to about 7 weeks, within about 2 weeks to about 6 weeks, within about 2 weeks to about 5 weeks, within about 2 weeks to about 4 weeks, or within about 4 weeks to about 6 weeks after an initial dose of the plasma cell depleting agent and/or B cell depleting agent and/or immunoglobulin depleting agent (e.g., the plasma cell depleting agent). The timing can depend, for example, on initial starting titer, and which IgG clearing agent is used. In some embodiments, for FcRn blockers, for low titers, the timing may be about 2 days to about 1 week. In some embodiments, for FcRn blockers, for high titers, it the timing may be about 4 to about 7 weeks. In some embodiments, for IgG degrading enzymes, for IdeS, the timing may be about 1 week to about 4 weeks for plasma cell depleting agent, then about 2 days to about 1 week for IdeS.

[1227] In one example in immunologically naïve subjects, the immunogen (e.g., nucleic acid construct or AAV) is administered within about 3 months, within about 2 months, within about 7 weeks, within about 6 weeks, within about 5 weeks, within about 4 weeks, within about 3 weeks, within about 2 weeks, or within about 1 week after an initial dose of the B cell depleting agent. In one example, the immunogen (e.g., nucleic acid construct or AAV) is administered at least about 1 week, at least about 2 weeks, at least about 3 weeks, at least about 4 weeks, at least about 5 weeks, at least about 6 weeks, at least about 7 weeks, at least about 2 months, or at least about 3 months after an initial dose of the B cell depleting agent. In one example, the immunogen (e.g., nucleic acid construct or AAV) is administered within about 1 week to about 3 months, within about 1 week to about 2 months, within about 1 week to about 7 weeks, within about 1 week to about 6 weeks, within about 1 week to about 5 weeks, within about 1 week to about 4 weeks, within about 1 week to about 3 weeks, within about 1 week to about 2 weeks, within about 2 months to about 3 months, within about 7 weeks to about 3 months, within about 6 weeks to about 3 months, within about 5 weeks to about 3 months, within about 4 weeks to about 3 months, within about 3 weeks to about 3 months, or within about 2 weeks to about 3 months after an initial dose of the B cell depleting agent. In one example, the immunogen (e.g., nucleic acid construct or AAV) is administered within about 1 week to about 7 weeks, within about 2 weeks to about 6 weeks, within about 3 weeks to about 5 weeks, within about 3 weeks to about 7 weeks, within about 4 weeks to about 7 weeks, within about 5 weeks to about 7 weeks, within about 1 week to about 6 weeks, within about 1 week to about 5 weeks, within about 1 week to about 4 weeks, or within about 1 week to about 2 weeks after an initial dose of the B cell depleting agent. In one example, the immunogen (e.g., nucleic acid construct or AAV) is administered within about 1 week before and within about 1 week after the B cell depleting agent.

[1228] Administration in vivo can be by any suitable route including, for example, parenteral, intravenous, oral, subcutaneous, intra-arterial, intracranial, intrathecal, intratumoral, intraperitoneal, topical, intranasal, or intramuscular. Systemic modes of administration include, for example, oral and parenteral routes. Examples of parenteral routes include intravenous, intraarterial, intraosseous, intramuscular, intradermal, subcutaneous, intranasal, and intraperitoneal routes. A specific example is intravenous infusion. Nasal instillation and intravitreal injection are other specific examples. Local modes of administration include, for example, intrathecal, intracerebroventricular, intraparenchymal (e.g., localized intraparenchymal delivery to the striatum (e.g., into the caudate or into the putamen), cerebral cortex, precentral gyrus, hippocampus (e.g., into the dentate gyrus or CA3 region), temporal cortex, amygdala, frontal cortex, thalamus, cerebellum, medulla, hypothalamus, tectum, tegmentum, or substantia nigra), intraocular, intraorbital, subconjunctival, intravitreal, subretinal, and transscleral routes. Significantly smaller amounts of the components (compared with systemic approaches) may exert an effect when administered locally (for example, intraparenchymal or intravitreal) compared to when administered systemically (for example, intravenously). Local modes of administration may also reduce or eliminate the incidence of potentially toxic side effects that may occur when therapeutically effective amounts of a component are administered systemically. In a specific example, administration in vivo is intravenous.

[1229] Administration in vivo can be by any suitable route including, for example, parenteral, intravenous, oral, subcutaneous, intra-arterial, intracranial, intrathecal, intraperitoneal, intratumoral, topical, intranasal, or intramuscular. A specific example is intravenous infusion.

[1230] Administration in vivo can be by any suitable route including, for example, systemic routes of administration such as parenteral administration, e.g., intravenous, subcutaneous, intra-arterial, or intramuscular. In a specific example, administration in vivo is intravenous.

[1231] The frequency of administration and the number of dosages can depend on a number of factors. The introduction of an immunogen (e.g., nucleic acid construct, nuclease agent or CRISPR/Cas system, e.g., in an immunogenic delivery vehicle) into the cell or subject can be performed one time or multiple times over a period of time. For example, the introduction can be performed only once over a period of time, at least two times over a period of time, at least three times over a period of time, at least four times over a period of time, at least five times over a period of time, at least six times over a period of time, at least seven times over a period of time, at least eight times over a period of time, at least nine times over a period of times, at least ten times over a period of time, at least eleven times, at least twelve times over a period of time, at least thirteen times over a period of time, at least fourteen times over a period of time, at least fifteen times over a period of time, at least sixteen times over a period of time, at least seventeen times over a period of time, at least eighteen times over a period of time, at least nineteen times over a period of time, or at least twenty times over a period of time. In some methods, a single administration of the immunogen (e.g., nucleic acid construct, nuclease agent or CRISPR/Cas system, e.g., in an immunogenic delivery vehicle), e.g., a vector, is sufficient to increase expression of polypeptide of interest to a desirable level. In other methods, more than one administration may be beneficial to maximize therapeutic effect.

[1232] The methods disclosed herein can increase polypeptide of interest protein levels and/or polypeptide of interest activity levels in a cell or subject (e.g., circulating, serum, or plasma levels in a subject) and can comprise measuring polypeptide of interest protein levels and/or polypeptide of interest activity levels in a cell or subject (e.g., circulating, serum, or plasma levels in a subject).

[1233] In some methods, polypeptide of interest activity and/or expression levels in a subject are increased to about or at least about 2%, about or at least about 10%, about or at least about 25%, about or at least about 40%, about or at least about 50%, about or at least about 75%, or at least about 100%, or more, of normal level. In some methods, polypeptide of interest activity and/or expression levels in a subject are increased to about or at least about 40%, about or at least about 50%, about or at least about 75%, or at least about 100%, or more, of normal level.

[1234] In some methods, circulating polypeptide of interest levels (i.e., serum levels) are about or at least about 0.5, about or at least about 1, about or at least about 2, about or at least about 3, about or at least about 4, about or at least about 5, about or at least about 6, about or at least about 7, about or at least about 8, about or at least about 9, or about or at least about 10 μg/mL. In some methods, polypeptide of interest levels are at least about 1 μg/mL or about 1 μg/mL. In some methods, polypeptide of interest levels are at least about 2 μg/mL or about 2 μg/mL. In some methods, polypeptide of interest levels are at least about 5 μg/mL or about 5 μg/mL. In some methods, polypeptide of interest levels are about 1 μg/mL to about 30 μg/mL, about 2 μg/mL to about 30 μg/mL, about 3 μg/mL to about 30 μg/mL, about 4 μg/mL to about 30 μg/mL, about 5 μg/mL to about 30 μg/mL, about 1 μg/mL to about 20 μg/mL, about 2 μg/mL to about 20 μg/mL, about 3 μg/mL to about 20 μg/mL, about 4 μg/mL to about 20 μg/mL, about 5 μg/mL to about 20 μg/mL. For example, the method can result in polypeptide of interest levels of about 2 μg/mL to about 30 μg/mL or 2 μg/mL to about 20 μg/mL. For example, the method can result in polypeptide of interest levels of about 5 μg/mL to about 30 μg/mL or 5 μg/mL to about 20 μg/mL. In some embodiments, the recited expression levels are at least 1 month after administration. In some embodiments, the recited expression levels are at least 2 months after administration. In some embodiments, the recited expression levels are at least 3 months after administration. In some embodiments, the recited expression levels are at least 4 months after administration. In some embodiments, the recited expression levels are at least 5 months after administration. In some embodiments, the recited expression levels are at least 6 months after administration. In some embodiments, the recited expression levels are at least 9 months after administration. In some embodiments, the recited expression levels are at least 12 months after administration.

[1235] In some methods, the method increases expression and/or activity of polypeptide of interest over the subject's baseline expression and/or activity (i.e., expression and/or activity prior to administration). In some methods, the method increases expression and/or activity of polypeptide of interest over the subject's baseline expression and/or activity (i.e., expression and/or activity prior to administration. In some methods, polypeptide of interest activity and/or polypeptide of interest expression or serum levels in a subject are increased by about or at least about 10%, about or at least about 25%, about or at least about 50%, about or at least about 75%, or about or at least about 100%, or more, as compared to the subject's polypeptide of interest expression or serum levels and/or activity before administration (i.e., the subject's baseline levels). In certain embodiments, the loss of function is nearly complete such that a relative activity cannot be determined. In certain embodiments, the level of expression is sufficient to treat at least one sign or symptom resulting from the loss of function of the polypeptide of interest.

[1236] In some methods, the method increases expression and/or activity of the polypeptide of interest over the cell's baseline expression and/or activity (i.e., expression and/or activity prior to administration). In some methods, the method increases expression and/or activity of polypeptide of interest over the cell's baseline expression and/or activity (i.e., expression and/or activity prior to administration. In some methods, polypeptide of interest activity and/or expression levels in a cell or population of cells (e.g., liver cells, or hepatocytes) are increased by about or at least about 10%, about or at least about 25%, about or at least about 50%, about or at least about 75%, about or at least about 100%, or more, as compared to the polypeptide of interest activity and/or expression levels before administration (i.e., the subject's baseline levels). In certain embodiments, the polypeptide of interest loss of function is nearly complete such that a relative activity cannot be determined. In certain embodiments, the level of expression is sufficient to treat at least one sign or symptom resulting from the loss of function of the polypeptide of interest.

[1237] In a specific example, the polypeptide of interest activity levels in a subject are increased to no more than about 300%, no more than about 250%, no more than about 200%, or no more than about 150% of normal polypeptide of interest activity levels.

[1238] In a specific example, the polypeptide of interest activity levels in the subject are increased to at least about 1%, at least about 5%, at least about 10%, at least about 15%, at least about 20%, at least about 25%, at least about 30%, at least about 35%, at least about 40%, at least about 45%, at least about 50%, at least about 55%, at least about 60%, at least about 65%, at least about 70%, at least about 75%, at least about 80%, at least about 85%, at least about 90%, or at least about 100% of normal polypeptide of interest activity levels. In a specific example, the polypeptide of interest activity levels in the subject are increased to at least about 40%, at least about 45%, at least about 50%, at least about 55%, at least about 60%, at least about 65%, at least about 70%, at least about 75%, at least about 80%, at least about 85%, at least about 90%, or at least about 100% of normal polypeptide of interest activity levels.

[1239] In some methods, the method results in increased expression of the polypeptide of interest in the subject (e.g., neonatal subject) compared to a method comprising administering an episomal expression vector encoding the polypeptide of interest in a control subject. In some methods, the method results in increased serum levels of the polypeptide of interest in the subject (e.g., neonatal subject) compared to a method comprising administering an episomal expression vector encoding the polypeptide of interest to a control subject.

[1240] In some methods, the method increases expression or activity of the polypeptide of interest over the subject's baseline expression or activity of the polypeptide of interest (i.e., any percent change in expression that is larger than typical error bars). In some methods, the method results in expression of the polypeptide of interest at a detectable level above zero, e.g., at a statistically significant level, a clinically relevant level.

[1241] In some methods, the expression or activity of the polypeptide of interest is at least 50% of the expression or activity of the polypeptide of interest at a peak level of expression measured for the subject at 24 weeks after the administering. In some methods, the expression or activity of the polypeptide of interest is at least 50% of the expression or activity of the polypeptide of interest at a peak level of expression measured for the subject at one year after the administering. In some methods, the expression or activity of the polypeptide of interest is at least 60% of the expression or activity of the polypeptide of interest at a peak level of expression measured for the subject at 24 weeks after the administering. In some methods, the expression or activity of the polypeptide of interest is at least 50% of the expression or activity of the polypeptide of interest at a peak level of expression measured for the subject at two years after the administering. In some methods, the expression or activity of the polypeptide of interest is at least 60% of the expression or activity of the polypeptide of interest at a peak level of expression measured for the subject at 2 years after the administering. In some methods, the expression or activity of the polypeptide of interest is at least 60% of the expression or activity of the polypeptide of interest at a peak level of expression measured for the subject at 24 weeks after the administering.

[1242] In some methods, the method further comprises assessing preexisting anti-polypeptide of interest immunity in a subject prior to administering any of the nucleic acid constructs described herein. For example, such methods could comprise assessing immunogenicity using a total antibody (TAb) immune assay or a neutralizing antibody (NAb) assay. In some methods, the subject has not previously been administered recombinant polypeptide of interest protein. In some methods, the subject has previously been administered recombinant polypeptide of interest protein.

[1243] In some methods, the method further comprises determining whether the subject has immunity against the nucleic acid construct, the polypeptide of interest, the nuclease agent, the one or more nucleic acids encoding the nuclease agent, or the delivery vehicle for the nucleic acid construct, the nuclease agent, or the one or more nucleic acids encoding the nuclease agent prior to the administering of any of the above. For example, the determining can comprise determining the presence of neutralizing antibodies against the nucleic acid construct, the polypeptide of interest, the nuclease agent, the one or more nucleic acids encoding the nuclease agent, or the delivery vehicle for the nucleic acid construct, the nuclease agent, or the one or more nucleic acids encoding the nuclease agent (e.g., determining the presence of neutralizing antibodies against an AAV comprising a nucleic acid construct). For example, the determining the presence of neutralizing antibodies can comprise determining whether there is an effective level of neutralizing antibody to prevent the intended outcome of insertion of a nucleic acid construct into a genomic locus or expression of the polypeptide of interest encoded by the nucleic acid construct. In some methods, the method further comprises assessing preexisting anti-AAV (e.g., anti-AAV8) immunity in a subject prior to administering any of the nucleic acid constructs described herein. For example, such methods could comprise assessing immunogenicity using a total antibody (TAb) immune assay or a neutralizing antibody (NAb) assay. See, e.g., Manno et al. (2006) Nat. Med. 12(3):342-347, Kruzik et al. (2019) Mol. Ther. Methods Clin. Dev. 14:126-133, and Weber (2021) Front. Immunol. 12:658399, each of which is herein incorporated by reference in its entirety for all purposes. In some embodiments, TAb assays look for antibodies that bind to the AAV vector, whereas NAb assays assess whether the antibodies that are present stop the AAV vector from transducing target cells. With TAb assays, the drug product or an empty capsid can be used to capture the antibodies; NAb assays can require a reporter vector (e.g., a version of the AAV vector encoding luciferase). In some embodiments, the subject does not have preexisting anti-AAV immunity. In some embodiments, the subject does have preexisting AAV immunity.

### XVIII. Kits

[1244] The present disclosure further comprises a kit which may comprise any of various compositions of the present disclosure, including the plasma cell depleting agents, the B cell depleting agents, the immunoglobulin depleting agents, and/or the immunogens (e.g., nucleic acid construct, nuclease agent or CRISPR/Cas system, e.g., in an immunogenic delivery vehicle) (e.g., immunogenic delivery vehicles), or pharmaceutical compositions thereof, of the disclosure.

[1245] One exemplary embodiment of the present disclosure comprises a kit comprising (i) a plasma cell depleting agent, (ii) a B cell depleting agent and/or an immunoglobulin depleting agent, and (iii) optionally, instructions for use. Another exemplary embodiment of the present disclosure comprises a kit comprising (i) an immunogen, (ii) a plasma cell depleting agent, (iii) optionally a B cell depleting agent and/or an immunoglobulin depleting agent, and (iv) optionally, instructions for use. Yet another exemplary embodiment of the present disclosure comprises a kit comprising (i) an immunogen, (ii) an anti-CD20×CD3 bispecific antibody or a functional fragment thereof, and (iii) optionally, instructions for use.

[1246] In one aspect, the present disclosure may include a kit comprising, for example: (a) a container that contains a pharmaceutical composition disclosed herein, for example, a pharmaceutical composition in solution or in lyophilized form; (b) optionally, a second container containing a diluent or reconstituting solution for the lyophilized formulation; and/or (c) optionally, instructions for (i) use of the solution or (ii) reconstitution and/or use of the lyophilized formulation.

[1247] In some embodiments, the kit may further comprise, for example, without limitation, one or more of (i) a buffer, (ii) a diluent, (iii) a filter, (iv) a needle, and/or (v) a syringe. As a non-limiting example, the container may be a bottle, a vial, a syringe, or test tube. In some embodiments, the container may be a multi-use container. In some the pharmaceutical composition may be lyophilized.

[1248] Kits of the present disclosure may comprise a lyophilized formulation of the present disclosure in a suitable container and instructions for its reconstitution and/or use. Suitable containers include, for example, bottles, vials (e.g., dual chamber vials), syringes (such as dual chamber syringes) and test tubes. The container may be formed from a variety of materials such as glass or plastic. The kit and/or container may contain instructions on or associated with the container that indicate directions for reconstitution of the lyophilized formulation and/or use of the kit. For example, the label may indicate that the lyophilized formulation is to be reconstituted to an appropriate peptide concentration. The label may indicate that the formulation is useful or intended for any route of administration disclosed herein, e.g., parenteral administration routes disclosed herein.

[1249] The container holding the formulation may be a multi-use vial, which may allow for repeat administrations (e.g., from 2-6 administrations) of the reconstituted formulation. The kit may further comprise a second container comprising a suitable diluent (e.g., sodium bicarbonate solution).

[1250] Upon mixing of the diluent and the lyophilized formulation, the final peptide concentration in the reconstituted formulation is reached. The kit may further include other materials desirable from a commercial and/or user standpoint, including, for example, without limitation, other buffers, diluents, filters, needles, syringes, and/or package inserts which may comprise, e.g., instructions for use.

[1251] Kits of the present disclosure may have a single container that contains the formulation of the pharmaceutical compositions according to the present disclosure with or without other components (e.g., other compounds or pharmaceutical compositions of these other compounds) or may have a distinct container for each component.

[1252] In some embodiments, kits of the disclosure may include a formulation of the disclosure packaged for use in combination with the coadministration of a second compound (such as adjuvants (e.g., GM-CSF, a chemotherapeutic agent, a natural product, a hormone or antagonist, an anti-angiogenesis agent or inhibitor, an apoptosis-inducing agent, or a chelator) or a pharmaceutical composition thereof. The components of the kit may be pre-complexed or each component may be in a separate distinct container prior to administration to a patient. The components of the kit may be provided in one or more liquid solutions. A liquid solution described herein may be an aqueous solution, for example, a sterile aqueous solution. The components of the kit may also be provided as solids, which may be converted into liquids such as by addition of suitable solvents, which may be provided in another distinct container.

[1253] The container of a therapeutic kit may be a vial, test tube, flask, bottle, syringe, or any other means of enclosing a solid or liquid. When there is more than one component, the kit may contain a second vial or other container, which may allow for separate dosing. The kit may also contain another container for a pharmaceutically acceptable liquid. In some embodiment, a kit may contain an apparatus (e.g., one or more needles, syringes, eye droppers, pipettes, etc.), which may allow for administration of the agents of the disclosure that are components of the present kit.

[1254] All patent filings, websites, other publications, accession numbers and the like cited above or below are incorporated by reference in their entirety for all purposes to the same extent as if each individual item were specifically and individually indicated to be so incorporated by reference. If different versions of a sequence are associated with an accession number at different times, the version associated with the accession number at the effective filing date of this application is meant. The effective filing date means the earlier of the actual filing date or filing date of a priority application referring to the accession number if applicable. Likewise, if different versions of a publication, website or the like are published at different times, the version most recently published at the effective filing date of the application is meant unless otherwise indicated. Any feature, step, element, embodiment, or aspect of the invention can be used in combination with any other unless specifically indicated otherwise. Although the present invention has been described in some detail by way of illustration and example for purposes of clarity and understanding, it will be apparent that certain changes and modifications may be practiced within the scope of the appended claims.

### BRIEF DESCRIPTION OF THE SEQUENCES

[1255] The nucleotide and amino acid sequences listed in the accompanying sequence listing are shown using standard letter abbreviations for nucleotide bases, and three-letter code for amino acids. The nucleotide sequences follow the standard convention of beginning at the 5′ end of the sequence and proceeding forward (i.e., from left to right in each line) to the 3′ end. Only one strand of each nucleotide sequence is shown, but the complementary strand is understood to be included by any reference to the displayed strand. When a nucleotide sequence encoding an amino acid sequence is provided, it is understood that codon degenerate variants thereof that encode the same amino acid sequence are also provided. The amino acid sequences follow the standard convention of beginning at the amino terminus of the sequence and proceeding forward (i.e., from left to right in each line) to the carboxy terminus.

TABLE 12
Description of Sequences.

| SEQ ID NO | Type | Description |
|---|---|---|
| 1 | DNA | Anti-BCMA HCVR DNA Sequence |
| 2 | Protein | Anti-BCMA HCVR Protein Sequence |
| 3 | DNA | Anti-BCMA HCDR1 DNA Sequence |
| 4 | Protein | Anti-BCMA HCDR1 Protein Sequence |
| 5 | DNA | Anti-BCMA HCDR2 DNA Sequence |
| 6 | Protein | Anti-BCMA HCDR2 Protein Sequence |
| 7 | DNA | Anti-BCMA HCDR3 DNA Sequence |
| 8 | Protein | Anti-BCMA HCDR3 Protein Sequence |
| 9 | DNA | Anti-BCMA LCVR DNA Sequence |
| 10 | Protein | Anti-BCMA LCVR Protein Sequence |
| 11 | DNA | Anti-BCMA LCDR1 DNA Sequence |
| 12 | Protein | Anti-BCMA LCDR1 Protein Sequence |
| 13 | DNA | Anti-BCMA LCDR2 DNA Sequence |
| 14 | Protein | Anti-BCMA LCDR2 Protein Sequence |
| 15 | DNA | Anti-BCMA LCDR3 DNA Sequence |
| 16 | Protein | Anti-BCMA LCDR3 Protein Sequence |
| 17 | DNA | Common LCVR DNA Sequence |
| 18 | Protein | Common LCVR Protein Sequence |
| 19 | DNA | Common LCDR1 DNA Sequence |
| 29 | Protein | Common LCDR1 Protein Sequence |
| 21 | DNA | Common LCDR2 DNA Sequence |
| 22 | Protein | Common LCDR2 Protein Sequence |
| 23 | DNA | Common LCDR3 DNA Sequence |
| 24 | Protein | Common LCDR3 Protein Sequence |
| 25 | DNA | Anti-CD3 HCVR DNA Sequence - REGN5458 |
| 26 | Protein | Anti-CD3 HCVR Protein Sequence - REGN5458 |
| 27 | DNA | Anti-CD3 HCDR1 DNA Sequence - REGN5458 |
| 28 | Protein | Anti-CD3 HCDR1 Protein Sequence - REGN5458 |
| 29 | DNA | Anti-CD3 HCDR2 DNA Sequence - REGN5458 |
| 30 | Protein | Anti-CD3 HCDR2 Protein Sequence - REGN5458 |
| 31 | DNA | Anti-CD3 HCDR3 DNA Sequence - REGN5458 |
| 32 | Protein | Anti-CD3 HCDR3 Protein Sequence - REGN5458 |
| 33 | DNA | Anti-CD3 HCVR DNA Sequence - REGN5459 |
| 34 | Protein | Anti-CD3 HCVR Protein Sequence - REGN5459 |
| 35 | DNA | Anti-CD3 HCDR1 DNA Sequence - REGN5459 |
| 36 | Protein | Anti-CD3 HCDR1 Protein Sequence - REGN5459 |
| 37 | DNA | Anti-CD3 HCDR2 DNA Sequence - REGN5459 |
| 38 | Protein | Anti-CD3 HCDR2 Protein Sequence - REGN5459 |
| 39 | DNA | Anti-CD3 HCDR3 DNA Sequence - REGN5459 |
| 40 | Protein | Anti-CD3 HCDR3 Protein Sequence - REGN5459 |
| 41 | Protein | Anti-BCMA Heavy Chain Protein Sequence (IgG4 Heavy Chain Constant Region) |
| 42 | Protein | Anti-CD3 Heavy Chain Protein Sequence (IgG4 Heavy Chain Constant Region with |
| | | H435R/Y436F) |
| 43 | Protein | Common Anti-BCMA and Anti-CD3 Light Chain Protein Sequence (Kappa Light |
| | | Chain Constant Region) |
| 44 | Protein | Anti-CD20 HCVR Protein Sequence |
| 45 | Protein | Common LCVR Protein Sequence |
| 46 | Protein | Anti-CD3 HCVR Protein Sequence |
| 47 | Protein | Anti-CD20 HCDR1 Protein Sequence |
| 48 | Protein | Anti-CD20 HCDR2 Protein Sequence |
| 49 | Protein | Anti-CD20 HCDR3 Protein Sequence |
| 50 | Protein | Common LCDR1 Protein Sequence |
| 51 | Protein | Common LCDR2 Protein Sequence |
| 52 | Protein | Common LCDR3 Protein Sequence |
| 53 | Protein | Anti-CD3 HCDR1 Protein Sequence |
| 54 | Protein | Anti-CD3 HCDR2 Protein Sequence |
| 55 | Protein | Anti-CD3 HCDR3 Protein Sequence |
| 56 | Blank | Blank |
| 57 | Protein | Human Factor IX Protein NCBI Accession No. NP_000124.1 |
| 58 | DNA | Human F9 mRNA (cDNA) NCBI Accession No. NM_000133.4 |
| 59 | DNA | Human F9 CDS CCDS ID CCDS14666.1 |
| 60 | DNA | Native F9 Insert |
| 61 | DNA | Native CpG removed no splice F9 Insert |
| 62 | DNA | Native CpG removed F9 Insert |
| 63 | DNA | Native splice removed F9 Insert |
| 64 | DNA | Codon optimized F9 Insert |
| 65 | DNA | COMP F9 Insert |
| 66 | DNA | DC F9 Insert |
| 67 | DNA | GA F9 Insert |
| 68 | DNA | CpG0 F9 Insert |
| 69 | DNA | CpG3 F9 Insert |
| 70 | DNA | CpG10 no CpG F9 Insert |
| 71 | DNA | CpG10 F9 Insert |
| 72 | DNA | CpG20 no CpG F9 Insert |
| 73 | DNA | CpG20 F9 Insert |
| 74 | DNA | Insert 72 |
| 75 | DNA | Insert 18 |
| 76 | DNA | Insert 19 |
| 77 | DNA | Insert 20 |
| 78 | DNA | Insert 21 |
| 79 | DNA | Insert 27 |
| 80 | DNA | Insert 28 |
| 81 | DNA | Insert 29 |
| 82 | DNA | Insert 30 |
| 83 | DNA | Insert 36 |
| 84 | DNA | Insert 37 |
| 85 | DNA | Insert 38 |
| 86 | DNA | Insert 39 |
| 87 | DNA | Insert 22 |
| 88 | DNA | Insert 23 |
| 89 | DNA | Insert 24 |
| 90 | DNA | Insert 25 |
| 91 | DNA | Insert 26 |
| 92 | DNA | Insert 31 |
| 93 | DNA | Insert 32 |
| 94 | DNA | Insert 33 |
| 95 | DNA | Insert 34 |
| 96 | DNA | Insert 35 |
| 97 | Protein | FIX Encoded by F9 Inserts |
| 98 | DNA | SV40 polyA |
| 99 | DNA | CpG depleted bGH polyA |
| 100 | DNA | Mouse Alb exon 2 Splice Acceptor |
| 101 | DNA | Insert 72 no ITRs |
| 102 | DNA | Insert 18 no ITRs |
| 103 | DNA | Insert 19 no ITRs |
| 104 | DNA | Insert 20 no ITRs |
| 105 | DNA | Insert 21 no ITRs |
| 106 | DNA | Insert 27 no ITRs |
| 107 | DNA | Insert 28 no ITRs |
| 108 | DNA | Insert 29 no ITRs |
| 109 | DNA | Insert 30 no ITRs |
| 110 | DNA | Insert 36 no ITRs |
| 111 | DNA | Insert 37 no ITRs |
| 112 | DNA | Insert 38 no ITRs |
| 113 | DNA | Insert 39 no ITRs |
| 114 | DNA | Insert 22 no ITRs |
| 115 | DNA | Insert 23 no ITRs |
| 116 | DNA | Insert 24 no ITRs |
| 117 | DNA | Insert 25 no ITRs |
| 118 | DNA | Insert 26 no ITRs |
| 119 | DNA | Insert 31 no ITRs |
| 120 | DNA | Insert 32 no ITRs |
| 121 | DNA | Insert 33 no ITRs |
| 122 | DNA | Insert 34 no ITRs |
| 123 | DNA | Insert 35 no ITRs |
| 124 | RNA | Cas9 mRNA |
| 125 | RNA | Cas9 mRNA CDS |
| 126 | DNA | Cas9 CDS |
| 127 | DNA | Human ALB Intron 1 |
| 128 | DNA | Guide RNA Target Sequence Plus PAM v1 |
| 129 | DNA | Guide RNA Target Sequence Plus PAM v2 |
| 130 | DNA | Guide RNA Target Sequence Plus PAM v3 |
| 131 | Protein | SpCas9 Protein V1 |
| 132 | DNA | SpCas9 DNA V1 |
| 133 | DNA | SpCas9 mRNA (cDNA) |
| 134 | Protein | SpCas9 Protein V2 |
| 135 | RNA | SpCas9 mRNA V2 |
| 136 | Protein | SV40 NLS v1 |
| 137 | Protein | SV40 NLS v2 |
| 138 | Protein | Nucleoplasmin NLS |
| 139 | RNA | crRNA Tail v1 |
| 140 | RNA | crRNA Tail v2 |
| 141 | RNA | TracrRNA v1 |
| 142 | RNA | TracrRNA v2 |
| 143 | RNA | TracrRNA v3 |
| 144 | RNA | gRNA Scaffold v1 |
| 145 | RNA | gRNA Scaffold v2 |
| 146 | RNA | gRNA Scaffold v3 |
| 147 | RNA | gRNA Scaffold v4 |
| 148 | RNA | gRNA Scaffold v5 |
| 149 | RNA | gRNA Scaffold v6 |
| 150 | RNA | gRNA Scaffold v7 |
| 151 | RNA | gRNA Scaffold v8 |
| 152 | RNA | Modified gRNA Scaffold |
| 153-184 | RNA | Human ALB Intron 1 Guide Sequences |
| 185-248 | RNA | Human ALB Intron 1 sgRNA Sequences |
| 249-280 | DNA | Human ALB Intron 1 Guide RNA Target Sequences |
| 281 | DNA | ITR 145 |
| 282 | DNA | ITR 141 |
| 283 | DNA | ITR 130 |
| 284 | DNA | SV40 polyA |
| 285 | DNA | bGH polyA |
| 286 | DNA | Mouse Alb exon 2 Splice Acceptor |
| 287 | RNA | Mouse Alb Intron 1 Guide Sequence g666 |
| 288 | DNA | Mouse Alb Intron 1 Guide RNA Target Sequence g666 |
| 289-290 | RNA | Mouse Alb Intron 1 sgRNA Sequences g666 |
| 291 | DNA | ITR 145 Reverse Complement |
| 292 | DNA | SV40 polyA v2 |
| 293 | Protein | Human GAA Protein (NP_000143.2) |
| 294 | DNA | Human GAA cDNA/mRNA (NM_000152.5) |
| 295 | DNA | Human GAA CDS (CCDS32760.1) |
| 296 | Protein | Human GAA (70-952) Protein |
| 297 | DNA | Human GAA (70-952) CDS |
| 298 | DNA | Human GAA (70-952) CDS - DC-0 |
| 299 | DNA | Human GAA (70-952) CDS - GA-0 |
| 300 | DNA | Human GAA (70-952) CDS - GS-0 |
| 301 | DNA | Human GAA (70-952) CDS - GS-0v2 |
| 302 | DNA | Human GAA (70-952) CDS - GS-1 |
| 303 | DNA | Human GAA (70-952) CDS - GS-44 |
| 304 | DNA | Human GAA (70-952) CDS - GS-50 |
| 305 | DNA | Human GAA (70-952) CDS - RE-8 |
| 306 | Protein | 12450 anti-CD63 scFv |
| 307 | DNA | 12450 anti-CD63 scFv CDS |
| 308 | DNA | 12450 anti-CD63 scFv CDS - DC-0 |
| 309 | DNA | 12450 anti-CD63 scFv CDS - GA-0 |
| 310 | DNA | 12450 anti-CD63 scFv CDS - GS-0 |
| 311 | DNA | 12450 anti-CD63 scFv CDS - GS-0v2 |
| 312 | DNA | 12450 anti-CD63 scFv CDS - GS-1 |
| 313 | DNA | 12450 anti-CD63 scFv CDS - GS-44 |
| 314 | DNA | 12450 anti-CD63 scFv CDS - GS-50 |
| 315 | DNA | 12450 anti-CD63 scFv CDS - RE-8 |
| 316 | Protein | 12450 anti-CD63 scFv:GAA (70-952) Fusion Protein |
| 317 | DNA | 12450 anti-CD63 scFv:GAA (70-952) Fusion Protein CDS |
| 318 | DNA | 12450 anti-CD63 scFv:GAA (70-952) Fusion Protein CDS - DC-0 |
| 319 | DNA | 12450 anti-CD63 scFv:GAA (70-952) Fusion Protein CDS - GA-0 |
| 320 | DNA | 12450 anti-CD63 scFv:GAA (70-952) Fusion Protein CDS - GS-0 |
| 321 | DNA | 12450 anti-CD63 scFv:GAA (70-952) Fusion Protein CDS - GS-0v2 |
| 322 | DNA | 12450 anti-CD63 scFv:GAA (70-952) Fusion Protein CDS - GS-1 |
| 323 | DNA | 12450 anti-CD63 scFv:GAA (70-952) Fusion Protein CDS - GS-44 |
| 324 | DNA | 12450 anti-CD63 scFv:GAA (70-952) Fusion Protein CDS - GS-50 |
| 325 | DNA | 12450 anti-CD63 scFv:GAA (70-952) Fusion Protein CDS - RE-8 |
| 326 | DNA | Human GAA (70-952) CDS - 1 - DC |
| 327 | DNA | Human GAA (70-952) CDS - 1 - GS |
| 328 | DNA | Human GAA (70-952) CDS - 2 - DC |
| 329 | DNA | Human GAA (70-952) CDS - 2 - GS |
| 330 | DNA | Human GAA (70-952) CDS - 3 - DC |
| 331 | DNA | Human GAA (70-952) CDS - 3 - GS |
| 332 | DNA | Human GAA (70-952) CDS - 4 - DC |
| 333 | DNA | Human GAA (70-952) CDS - 4 - GS |
| 334-655 | DNA & | Domains in Anti-hTfR Antibodies, Antigen-Binding Fragments or scFv Molecules |
| | Protein | |
| 656-687 | Protein | Anti-hTfR scFvs |
| 688 | Protein | 12799B-2xG4S-GAA |
| 689 | Protein | 12839B-2xG4S-GAA |
| 690 | Protein | 12843B-2xG4S-GAA |
| 691 | Protein | 12847B-2xG4S-GAA |
| 692 | DNA | 12799B-2xG4S-GAA |
| 693 | DNA | 12839B-2xG4S-GAA |
| 694 | DNA | 12843B-2xG4S-GAA |
| 695 | DNA | 12847B-2xG4S-GAA |
| 696-698 | DNA | Optimized 12799B-2xG4S-GAA |
| 699-701 | DNA | Optimized 12843B-2xG4S-GAA |
| 702-704 | DNA | Optimized 12847B-2xG4S-GAA |
| 705 | DNA | 12799 GA 0 anti-TfR scFv |
| 706 | DNA | 12799 GS 0 anti-TfR scFv |
| 707 | DNA | 12799 GS 0v2 anti-TfR scFv |
| 708 | DNA | 12843 GA 0 anti-TfR scFv |
| 709 | DNA | 12843 GS 0 anti-TfR scFv |
| 710 | DNA | 12843 GS 0v2 anti-TfR scFv |
| 711 | DNA | 12847 GA 0 anti-TfR scFv |
| 712 | DNA | 12847 GS 0 anti-TfR scFv |
| 713 | DNA | 12847 GS 0v2 anti-TfR scFv |
| 714 | DNA | 12799 anti-TfR scFv |
| 715 | DNA | 12839 anti-TfR scFv |
| 716 | DNA | 12843 anti-TfR scFv |
| 717 | DNA | 12847 anti-TfR scFv |
| 718 | Protein | Linker |
| 719 | Protein | Kappa Constant Light Domain |
| 720 | Protein | IgG1 CH1 Heavy Domain |
| 721-790 | Protein | Fab Heavy and Light Chains |
| 791 | Protein | Mus musculus Ror1 Signal Peptide |
| 792 | Protein | IgG4 CH1 Heavy Domain |
| 793-824 | Protein | Additional anti-TfR scFv:GAA Sequences |
| 825 | DNA | ITR 141 Reverse Complement |
| 826 | DNA | ITR 130 Reverse Complement |
| 827 | DNA | SV40 polyA V3 |
| 828 | Protein | 3X G4S Linker |
| 829 | Protein | 2X G4S Linker |
| 830-834 | DNA | 3X G4S Linker Coding Sequences |
| 835-841 | DNA | 2X G4S Linker Coding Sequences |
| 842 | DNA | 1X G4S Linker Coding Sequence |
| 843 | DNA | pINT ITR130 12843 GAA native SV40pA |
| 844 | DNA | pINT ITR130 12843scFv:GAA 0CpG v0 (GA 0) |
| 845 | DNA | pINT ITR130 12843scFv:GAA 0CpG v1 (GS 0 v1) |
| 846 | DNA | pINT ITR130 12843scFv:GAA 0CpG v2 (GS 0 v2) |
| 847 | DNA | pINT ITR 130 12847scFv:GAA native |
| 848 | DNA | pINT ITR130 12847scFv:GAA 0CpG v0 (GA 0) |
| 849 | DNA | pINT ITR130 12847scFv:GAA 0CpG v1 (GS 0 v1) |
| 850 | DNA | PINT ITR130 12847scFv:GAA 0CpG v2 (GS 0 v2) |
| 851 | DNA | pINT-ITR130-Anti-CD63:GAA GA 0 |
| 852 | DNA | 2xFix 12847 anti-TfR:GAA Coding Sequence |
| 853 | Protein | 12847 anti-TfR:GAA Fusion Protein |
| 854 | DNA | 3xG4S Linker Coding Sequence |
| 855 | DNA | 1xG4S Linker Coding Sequence |
| 856 | DNA | GAA (70-952) Coding Sequence [3078_GT_>_GG] |
| 857 | DNA | GAA (70-952) Coding Sequence [1830_GGTGGT_>_GGGGGC] |
| | | [3078_GT_>_GG] |
| 858 | DNA | bGH polyA v2 |
| 859 | DNA | SV40_late_polyA w/Reverse Strand AAUAAAs Mutated to AAUCAAs |
| 860 | DNA | Synthetic polyA (SPA) |
| 861 | DNA | Stuffer Sequence |
| 862 | DNA | MAZ Element |
| 863 | DNA | 6xFix anti-CD63:GAA Coding Sequence |
| 864 | DNA | 4xFix anti-CD63:GAA Coding Sequence [274_G > T] 723_T > G |
| | | 1830_GGT_GGT_>_GGG_GGC 3078_GT > GG] |
| 865 | DNA | 1xFix anti-CD63:GAA Coding Sequence [3078_GT > GG] |
| 866 | DNA | 6xFix anti-CD63 scFv Coding Sequence |
| 867 | DNA | 4xFix anti-CD63 scFv Coding Sequence |
| 868 | Protein | Anti-CD63 scFv VH |
| 869 | Protein | Anti-CD63 scFv VK |
| 870 | DNA | VVT874/VVT1251 - TfR Original Template pMID27199 ITR to ITR |
| 871 | DNA | VVT1125/VVT1261 - pAAV-12847GAA(GS0v2)-2Xfix-bGH.sv40LuniPA |
| 872 | DNA | VVT1129/VVT1262 - pAAV-12847GAA(GS0v2)-2Xfix-bGHpA |
| 873 | DNA | VVT1126 - pAAV-12847GAA(GS0v2)-bGHpA swap |
| 874 | DNA | VVT1254/VVT1252 - CD63 Original Template pMID27863 ITR to ITR |
| 875 | DNA | VVT1121 - pAAV-CD63GAA-4Xfix-bGH.sv40LuniPA |
| 876 | DNA | VVT1122 - pAAV-CD63GAA-4Xfix-bGHpA |
| 877 | DNA | VVT1123 - pAAV-CD63GAA-3078fix-bGH.sv40LuniPA (1CpG) |
| 878 | DNA | VVT1118 - pAAV-CD63GAA-3078fix-bGHpA |
| 879 | DNA | VVT1124 - pAAV-CD63GAA-bGHpA swap |
| 880 | DNA | VVT1119 - pAAV-CD63GAA-bGHpA.SPA swap |
| 881 | DNA | VVT1120 - pAAV-CD63GAA-bGHpA.stuffer.SPA |
| 882 | DNA | VVT1138 - pAAV-CD63GAA-bGHpA-MAZ |
| 883 | DNA | VVT1127 - pAAV-CD63GAA-SV40E-MAZ |
| 884 | DNA | VVT1128/VVT1263 - pAAV-CD63GAA-6Xfix-bGH.sv40LuniPA |
| 885 | DNA | VVT1139/VVT1264 - pAAV-CD63GAA-6Xfix-bGHpA |
| 886 | DNA | VVT874/VVT1251 - TfR Original Template pMID27199 - no ITRs |
| 887 | DNA | VVT1125VVT/1261 - pAAV-12847GAA(GS0v2)-2Xfix-bGH.sv40LuniPA - no |
| | | ITRs |
| 888 | DNA | VVT1129/VVT1262 - pAAV-12847GAA(GS0v2)-2Xfix-bGHpA - no ITRs |
| 889 | DNA | VVT1126 - pAAV-12847GAA(GS0v2)-bGHpA swap - no ITRs |
| 890 | DNA | VVT1254/VVT1252 - CD63 Original Template pMID27863 - no ITRs |
| 891 | DNA | VVT1121 - pAAV-CD63GAA-4Xfix-bGH.sv40LuniPA - no ITRs |
| 892 | DNA | VVT1122 - pAAV-CD63GAA-4Xfix-bGHpA - no ITRs |
| 893 | DNA | VVT1123 - pAAV-CD63GAA-3078fix-bGH.sv40LuniPA (1CpG) - no ITRs |
| 894 | DNA | VVT1118 - pAAV-CD63GAA-3078fix-bGHpA - no ITRs |
| 895 | DNA | VVT1124 - pAAV-CD63GAA-bGHpA swap - no ITRs |
| 896 | DNA | VVT1119 - pAAV-CD63GAA-bGHpA.SPA swap - no ITRs |
| 897 | DNA | VVT1120 - pAAV-CD63GAA-bGHpA.stuffer.SPA - no ITRs |
| 898 | DNA | VVT1138 - pAAV-CD63GAA-bGHpA-MAZ - no ITRs |
| 899 | DNA | VVT1127 - pAAV-CD63GAA-SV40E-MAZ - no ITRs |
| 900 | DNA | VVT1128/VVT1263 - pAAV-CD63GAA-6Xfix-bGH.sv40LuniPA - no ITRs |
| 901 | DNA | VVT1139/VVT1264 - pAAV-CD63GAA-6Xfix-bGHpA - no ITRs |
| 902 | DNA | Combined BGH and Unidirectional SV40 Late Polyadenylation Signal |

### EXAMPLES

### Example 1. Plasma Cell Depletion in Combination with Neonatal Fc Receptor (FcRn) Blockade Elicits Rapid and Deep Suppression of Pre-Existing Andi-AAV Antibody Titers

[1256] For adeno-associated virus gene therapy, the generation of neutralizing antibodies after exposure precludes the ability to re-administer AAV vectors of the same or related serotypes, despite therapeutic need. Furthermore, due to natural exposure to wild-type AAVs, roughly 30-60% of individuals harbor pre-existing antibodies to AAV that prevent administration of even a single AAV vector. Therefore, strategies that can attenuate pre-existing anti-AAV antibody responses induced by either recombinant or wild type AAVs have the potential to greatly expand the versatility and accessibility of AAV gene therapies to a broader patient population. In some embodiments, the subsequently administered AAV vector has a capsid derived from the same AAV serotype as the originally administered AAV vector.

[1257] Because plasma cells are the source of long-lived antibody responses, it was reasoned that antibody-mediated plasma cell depletion may suppress pre-existing antibody responses to AAV sufficiently to enable AAV vector transduction or re-transduction in seropositive animals. To test this, B cell maturation antigen (BCMA)- and CD3 gamma-, CD3 delta-, and CD3 epsilon-humanized mice (n=6 per group) were treated with 1e12 vector genomes (vg) per kilogram (kg) recombinant AAV8 (encoding a promoterless transgene) to induce a strong anti-capsid antibody response (e.g., high-titer nAbs). 73 days later, a timepoint deemed sufficient to account for long-lived plasma cell differentiation, mice were injected subcutaneously weekly for five weeks with 25 milligrams (mg) per kg linvoseltamab, also known as REGN5458, a fully-human T cell-bridging bispecific antibody targeting B cell maturation antigen and CD3 (referred to herein as “anti-BCMA×CD3 bispecific antibody”) to induce plasma cell depletion. Additionally, because the half-life of immunoglobulin G is relatively long (˜6-8 days in mice and ˜21 days in humans) due to the action of neonatal Fc receptor (“FcRn”), it was also evaluated whether additional blockade of FcRn with efgartigimod alfa, administered subcutaneously weekly at 20 mg/kg, could further accelerate and improve titer reductions elicited by plasma cell depletion. Finally, to capture a wider range of AAV-specific B cells that may not express high levels of BCMA, such as committed memory B cells and early plasmablasts, it was also tested whether additional B cell depletion with a cocktail of anti-CD19/CD20 antibodies, administered subcutaneously weekly at 25 mg/kg each, may further improve the therapeutic effect of plasma cell depletion with anti-BCMA×CD3 bispecific antibody. Mice were bled at defined intervals for serum anti-AAV antibody analysis. A schematic of the full experimental design is presented in FIG. 1. To prevent any initial impact of efgartigimod alfa on the therapeutic effect of anti-BCMA×CD3 bispecific antibody or anti-CD19/CD20 antibodies, which are themselves immunoglobulins, efgartigimod alfa was omitted from the first week's treatment cocktails.

[1258] To evaluate the impact of plasma cell depletion, FcRn blockade, B cell depletion, or combinations thereof on anti-AAV8 IgG titers, anti-capsid IgG levels were measured in serum of mice over time. Specifically, 96 well flat-bottom plates were coated with 1e9 vg/well recombinant AAV8 vector in DPBS overnight. The next day, plates were washed and blocked with 0.5% bovine serum albumin in DPBS for 1 hr. Serum samples were then diluted 3×, beginning at an initial dilution of 1:300 and ending at a dilution of 53,144,100. Diluted serum was then transferred to the assay plate and incubated overnight at 4° C. The next day, the assay plates were repeatedly washed prior to incubation with an anti-mouse-IgG Fc-gamma Fragment-HRP-conjugated polyclonal secondary antibody (Jackson Immunoresearch, West Grove, PA). Plates were again repeatedly washed prior to development with TMB substrate solution. After 20 minutes, the reaction was stopped by addition of 2N phosphoric acid. Absorbance at 450 nm (OD450) was measured on a SpectraMax i3 plate reader (Molecular Devices, San Jose, CA). Relative levels of serum anti-AAV8 IgG were determined and plotted as titer values using Prism v.9 software (GraphPad, Boston, MA). Titer was defined as the dilution factor required to achieve an OD450 reading equal to 2-fold higher than background values.

[1259] It was found that while anti-AAV8 antibody titers showed minor declines over time in mice administered either anti-BCMA×CD3 bispecific antibody, efgartigimod alfa, or anti-CD19/CD20 antibodies individually, the titer reductions were minor and not statistically different from AAV-treated mice that received no immunomodulation. By contrast, mice receiving a cocktail of anti-BCMA×CD3 bispecific antibody and efgartigimod alfa showed rapid titer declines to naïve or near-naive levels, and mice additionally treated with anti-CD19/CD20 antibodies showed even more rapid and complete titer declines, with all 6/6 mice exhibiting titers below the limit of detection by the cessation of the five-week treatment period (FIG. 2). Thus, these data demonstrate that anti-AAV8 titers can be suppressed by therapeutic plasma cell depletion, with the timeframe required for anti-AAV8 titer depletion reduced by FcRn blockade. Additionally, the depth of titer reduction can be further enhanced with B cell depletion in mice.

### Example 2. Plasma Cell Depletion in Combination with FcRn Blockade Enables AAV Vector Re-Administration

[1260] Next was evaluated whether the deep titer reductions observed in mice following combination treatment of anti-BCMA×CD3 bispecific antibody and efgartigimod alfa, and following combination treatment of anti-BCMA×CD3 bispecific antibody, efgartigimod alfa, and anti-CD19/CD20 antibodies, could enable re-transduction with a second AAV vector. To this end, the mice from Example 1 were treated intravenously with 3e12 vg/kg AAV8 GFP, then sacrificed 10 days later to evaluate transgene expression in liver (FIG. 1). While nearly all mice receiving no immunomodulation or single-agent immunomodulation failed to achieve any re-transduction in liver, due to presence of anti-AAV8 antibodies from previous AAV8 exposure, significant levels of GFP transgene DNA (FIG. 3) and RNA (FIG. 4) were observed in mice receiving anti-BCMA×CD3 bispecific antibody+FcRn blocker, and less frequently in mice receiving anti-BCMA×CD3 bispecific antibody+anti-CD19/CD20 antibodies, as measured by quantitative real-time PCR and quantitative real-time reverse transcription PCR, respectively. 3/6 mice receiving anti-BCMA×CD3 bispecific antibody+FcRn blocker achieved re-transduction equivalent to seronegative control mice. The greatest level of re-transduction was observed in the triple combination group, with 6/6 mice achieving transgene levels equivalent to that of previously naive mice. Inmunohistochemical staining of formalin-fixed, paraffin-embedded liver sections for GFP transgene protein corroborated these findings (FIGS. 5A-5B). Together, these data indicate that anti-BCMA×CD3 bispecific antibody-mediated plasma cell depletion, particularly in combination with FcRn blockade, can enable AAV re-dosing, or other immunogenic gene therapy vectors, regardless of serostatus, and that the success rate for re-dosing may be further enhanced by B cell depletion in mice.

### Example 3. Analysis of Plasma Cell Frequencies and Counts in Spleen and Bone Marrow Following Anti-BCMA×CD3 Bispecific Antibody Treatment

[1261] To confirm on-target activity of anti-BCMA×CD3 bispecific antibody, plasma cell numbers in bone marrow and spleen were evaluated by flow cytometry at the time of sacrifice (FIG. 1). Specifically, single-cell splenocyte suspensions were prepared by mechanical disruption of spleen. For bone marrow extraction, femurs were cut at both ends, placed in a PCR plate with holes punched at the bottom, and spun down for 3 minutes at 500 g. Red blood cells were lysed using ACK lysis buffer. Cells were transferred to a 96 well U-bottom plate, centrifuged at 400 g for 4 minutes and stained with LIVE/DEAD Fixable Blue Dead Cell dye (ThermoFisher) for 15 minutes at room temperature. Cells were washed and incubated in Fc block (Tonbo Biosciences) for 15 to 30 minutes at 4° C. For detection of AAV-specific B cells, splenocytes were incubated with recombinant AAV8 for 1 hr on ice, (multiplicity of infection [MOI] of 10,000) to facilitate interactions between AAV particles and antigen-specific BCRs, followed by washing and labeling with anti-AAV8 biotinylated antibody (clone ADK8, Progen) and surface stain antibody cocktail (Table 13) for 30 minutes at 4° C. in Brilliant Stain buffer (BD Biosciences). Cells were again washed and then stained with Streptavidin-PE conjugate (Biolegend) for an additional 20 minutes at 4° C., followed by washing and fixation with BD Cytofix (BD Biosciences). For intracellular staining, samples were washed and incubated in 1× Perm/Wash buffer (BD Biosciences) for 20 minutes and resuspended in intracellular stain (Table 13) for 30 minutes at 4° C. followed by washing and fixation with BD Cytofix (BD Biosciences). CountBright Absolute counting Beads (ThermoFisher) were used according to the manufacturer's protocol to enumerate absolute cell counts. Acquisition was performed on a RD FACSymphony A5 using FACSDiva software. Analysis was performed using FlowJo or OMIQ software. All B cells were first gated according to light scatter properties, then negatively gated to exclude viability dye positive and non-B cell lineage marker positive cells. Specific B cell populations were then gated as follows: Naïve B cells, CD19+B220+CD1d−IgD+CD38+; Memory B cells, CD19+B220+CD1d−IgD−CD38+AAV+/−; Plasma cells: B220−IgD-CD138+Light Chain+.

TABLE 13
The flow cytometry antibody staining panel used in FIGS. 6A-6J.

| | | | | | | |
|---|---|---|---|---|---|---|
| Reagent/Antigen | Conjugate | Reactivity | Host | Clone | Isotype | Supplier |

Pre-Stain

| | | | | | | |
|---|---|---|---|---|---|---|
| Live/Dead | Blue | N/A | N/A | N/A | N/A | Invitrogen |
| AAV8 | None | N/A | N/A | N/A | N/A | N/A |
| Fc Block | None | Human | Rat | 2.4G2 | N/A | TONGO |
| (CD16/32) | | | | | | biosciences |

Surface stain

| | | | | | | |
|---|---|---|---|---|---|---|
| CD38 | BUV395 | Mouse/ | Rat | 90/CD38 | IgG2a, k | BD |
| | | Human | | | | |
| CD138 | BV711 | Mouse | Rat | 281-2 | IgG2a, κ | BD |
| CD95 | BV421 | Mouse | Hamster | Jo2 | IgG2, λ | BD |
| GL-7 | PerCP- | Mouse/ | Rat | GL7 | IgM, k | Biolegend |
| | Cy5.5 | Human | | | | |
| IgD | BV786 | Mouse | Rat | 11-26c.2a | IgG2a, k | BD |
| IgA | FITC | Mouse | Rat | C10-3 | IgG1, κ | BD |
| IgG1 | BV510 | Mouse | Rat | A85-1 | IgG1, κ | BD |
| CD19 | BUV737 | Mouse | Rat | 1D3 | IgG2a, κ | BD |
| B220 | PE-Cy7 | Mouse | Rat | RA3-6B2 | IgG2a, κ | BD |
| CD98 | BV605 | Mouse | Hamster | H202-141 | IgG2a, κ | BD |
| CD1d | BUV563 | Mouse | Rat | WTH2 | IgG2a, κ | BD |
| Biotinylated | N/A | | Mouse | ADK8 | IgG2a | Progen |
| anti-AAV8 | | | | | | |
| IgG | | | | | | |
| TCRβ | APC | Mouse | Hamster | H57-597 | IgG2, λ1 | BD |
| CD200R3 | APC | Mouse | Rat | Ba13 | IgG2a, κ | Biolegend |
| Ly6G | APC | Mouse | Rat | 1A8-Ly6g | IgG2a, κ | eBioscience |
| CD49b | APC | Mouse | Rat | DX5 | IgM, κ | Biolegend |
| CD11b | APC | Mouse | Rat | M1/70 | IgG2b, κ | Biolegend |

Secondary Stain

| | | | | | | |
|---|---|---|---|---|---|---|
| Streptavidin | PE | N/A | N/A | N/A | N/A | Biolegend |

Intracellular stain

| | | | | | | |
|---|---|---|---|---|---|---|
| Light Chain k | BV650 | Mouse | Rat | 187.1 | IgG1, k | BD |
| Light Chain I | BV650 | Mouse | Rat | R26-46 | IgG2a, κ | BD |
| IgG1 | BV510 | Mouse | Rat | A85-1 | IgG1, k | BD |
| IgA | FITC | Mouse | Rat | C10-3 | IgG1, k | BD |

[1262] Analysis of B cell and plasma cell frequencies (FIGS. 6A-6E) and cell counts (FIGS. 6F-6J) in the bone marrow and spleen revealed that plasma cells were fully depleted in groups receiving anti-BCMA×CD3 bispecific antibody+anti-CD19/CD20 antibodies and the triple combination of anti-BCMA×CD3 bispecific antibody+efgartigimod alfa+anti-CD19/CD20 antibodies, consistent with reductions in anti-AAV8 titers seen in these groups. However, plasma cells were incompletely depleted in anti-BCMA×CD3 bispecific antibody groups that did not also receive anti-CD19/CD20 antibodies, suggesting either that ongoing plasma cell formation is a significant contributor to the anti-AAV8 IgG antibody pool in this model, or that mice developed anti-drug antibodies that react with anti-BCMA×CD3 bispecific antibody (a human IgG) that may have limited its therapeutic effect in the absence of B cell depletion (which would also deplete anti-human IgG-specific B cells). The effectiveness of anti-CD19/CD20 antibodies-mediated B cell depletion was also confirmed in analyses of naïve, memory, and AAV-specific B cells, with all subsets fully depleted except for a small subset of total memory B cells that were not depleted in the anti-BCMA×CD3 bispecific antibody+anti-CD19/CD20 antibodies combination group. Collectively, these data show that the titer reductions observed in the anti-BCMA×CD3 bispecific antibody+efgartigimod alfa+anti-CD19/CD20 antibodies are consistent with the expected mechanism of action, and that, by comparison, incomplete titer reductions observed in the anti-BCMA×CD3 bispecific antibody+efgartigimod alfa group may be explained by incomplete plasma cell depletion, possibly due to development of anti-drug antibodies reactive with anti-BCMA×CD3 bispecific antibody, efgartigimod, or both.

### Example 4. Use of BCMA×CD3 to Suppress Pre-Existing Anti-AAV nAbs Resulting from Wild-Type AAV Exposure and Enable Gene Insertion of an AAV Transgene Template

[1263] In this example, plasma cell depletion with BCMA×CD3 is utilized in combination with FcRn antagonism to suppress pre-existing antibody titers to AAV arising from natural AAV exposure, and consequently enable gene insertion of an AAV transgene template. Cynomolgus macaques with pre-existing total AAV antibody titers and AAV nAb titers ranging from low to high titer, are treated with BCMA×CD3 (REGN5458) with or without efgartigimod alfa (or alternative FcRn blocking therapeutic), and with or without CD20×CD3 bispecific antibody (REGN1979, or alternative B cell depletion therapeutic) weekly. Anti-AAV8 neutralizing and total antibody titers are evaluated biweekly. Monkeys treated with BCMA×CD3 alone are expected to show gradual decline in pre-existing anti-AAV8 antibody titers, but the effect is expected to be accelerated and magnified in groups additionally receiving FcRn antagonist, or groups additionally receiving FcRn antagonist and B cell depletion, with titers being reduced to sub-neutralizing levels. Monkeys not receiving BCMA×CD3 are not expected to show the same frequency, rate, or magnitude of titer decline. Several weeks later, monkeys are dosed intravenously with an AAV8 template vector containing a promoterless unidirectional or bidirectional DNA template encoding a therapeutic transgene (e.g., human FIX) and an LNP containing mRNA encoding SpCas9 and a gRNA specific for creating a specific double strand break at a specific monkey genomic locus (e.g., intron 1 of monkey albumin). When transduction and expression of the therapeutic transgene are measured in liver by qPCR, DNA sequencing, and protein ELISA, results are expected to show that only monkeys receiving BCMA×CD3 exhibit productive gene insertion and measurable transgene mRNA and protein, whereas monkeys receiving no BCMA×CD3 fail to achieve AAV transduction, gene insertion, and expression. Monkeys receiving both BCMA×CD3 and FcRn blockade, or BCMA×CD3+FcRn blockade+B cell depletion, are expected to exhibit significantly higher levels of transduction, gene insertion, and expression than BCMA×CD3 treatment alone.

### Example 5. Use of BCMA×CD3 to Suppress Anti-AAV Neutralizing Antibody Responses and Enable Repeated Gene Insertion of an Identical AAV Template at a Single Genetic Locus

[1264] BCMA×CD3-mediated plasma cell depletion can allow for repeat administration of the same AAV template and LNP to achieve stepwise increase in transgene at a single genetic locus. In this example, BCMA-, CD3gamma-, CD3-delta, and CD3-epsilon humanized mice are intravenously treated with an AAV8 template vector containing a promoterless unidirectional or bidirectional DNA template encoding a therapeutic transgene (e.g., human FIX) and an LNP containing mRNA encoding SpCas9 and a gRNA specific for creating a specific double strand break at a specific mouse genomic locus (e.g., intron 1 of mouse albumin). The insertion event is expected to result in measurable expression of the transgene. When anti-AAV8 antibody titers are evaluated several weeks after treatment by anti-AAV8 antibody ELISA, all AAV8 template treated mice are expected to exhibit strong antibody responses due to immune recognition of the AAV8 capsid. Several months later, mice are treated weekly with BCMA×CD3 (REGN5458), FcRn blocker (efgartigimod alfa or similar), and/or B cell depletion (anti-CD20+anti-CD19 antibody cocktail, or similar), individually or in combination. As controls, some mice are not treated with immunomodulation. When anti-AAV8 antibody titers are again measured by ELISA, results are expected to show that all mice treated with BCMA×CD3 show gradual reduction in anti-AAV8 antibody titer over the five-week treatment period, but that this reduction is more significant and rapid in mice that additionally receive FcRn blockade. Results are further expected to show that mice receiving triple combination of BCMA×CD3, FcRn blockade, and B cell depletion have even more accelerated and pronounced decreases in anti-AAV8 antibody titer, whereas mice not receiving BCMA×CD3 do not show the same frequency, rate, or magnitude of titer decline. Mice are then treated intravenously with the same AAV8 template vector and LNP that were initially administered. When transduction and expression of the therapeutic transgene are measured several weeks later in liver by qPCR, DNA sequencing, and protein ELISA, results are expected to show that mice receiving BCMA×CD3 exhibit an increase in levels of inserted template and augmented expression at the mRNA and protein levels, whereas mice receiving no BCMA×CD3 fail to achieve any additional increase in levels of template DNA insertion and expression. Mice receiving both BCMA×CD3 and FcRn blockade, or BCMA×CD3+FcRn blockade+B cell depletion are expected to exhibit a significantly greater increase in inserted template levels and expression over mice treated with BCMA×CD3 treatment alone. Additional dosings with the same AAV template and LNP are possible with repeat courses of BCMA×CD3 immunomodulation and AAV8+LNP administration.

### Example 6. Use of BCMA×CD3 to Suppress Anti-AAV Neutralizing Antibody Responses and Enable Repeated Gene Insertion of Multiple AAV Templates at Separate Genetic Loci

[1265] BCMA×CD3-mediated plasma cell depletion can allow for repeat administration of an AAV template and LNP to achieve multiple insertions at separate genomic locations. In this example, BCMA-, CD3gamma-, CD3-delta, and CD3-epsilon humanized mice are treated with an AAV8 template vector containing a promoterless unidirectional or bidirectional DNA template encoding a therapeutic transgene (e.g., human FIX) and an LNP containing mRNA encoding SpCas9 and a gRNA specific for creating a specific double strand break at a specific mouse genomic locus (e.g., intron 1 of mouse albumin). The insertion event is expected to result in measurable expression of the transgene. When anti-AAV8 antibody titers are evaluated several weeks after treatment by anti-AAV8 antibody ELISA, all AAV8 template treated mice are expected to exhibit strong antibody responses due to immune recognition of the AAV8 capsid. Several months later, mice are treated weekly with BCMA×CD3 (REGN5458), FcRn blocker (efgartigimod alfa or similar), and/or B cell depletion (anti-CD20+anti-CD19 antibody cocktail, or similar), individually or in combination. As controls, some mice are not treated with immunomodulation. When anti-AAV8 antibody titers are again measured by ELISA, results are expected to show that all mice treated with BCMA×CD3 show gradual reduction in anti-AAV8 antibody titer over the five-week treatment period, but that this reduction is more significant and rapid in mice that additionally receive FcRn blockade. Results are further expected to show that mice receiving triple combination of BCMA×CD3, FcRn blockade, and B cell depletion have even more accelerated and pronounced decreases in anti-AAV8 antibody titer, whereas mice not receiving BCMA×CD3 do not show the same frequency, rate, or magnitude of titer decline. Mice are then treated with a second AAV8 template vector containing a unidirectional or bidirectional DNA template encoding a second distinct therapeutic transgene (e.g., a therapeutic human IgG1 targeting a viral antigen) and an LNP containing mRNA encoding SpCas9 and a gRNA specific for creating a specific double strand break at a specific mouse genomic locus, distinct from the first cut site. When transduction and expression of the second therapeutic transgene are measured in liver by qPCR, DNA sequencing, and protein ELISA, results are expected to show that only mice receiving BCMA×CD3 exhibit a second productive gene insertion event and measurable mRNA and protein of the second transgene, whereas mice receiving no BCMA×CD3 fail to achieve AAV transduction, gene insertion, and expression. Mice receiving both BCMA×CD3 and FcRn blockade, or BCMA×CD3+FcRn blockade+B cell depletion, are expected to exhibit significantly higher levels of transduction, gene insertion, and expression than BCMA×CD3 treatment alone. Additional gene insertions are possible at other genetic loci with repeat courses of BCMA×CD3 immunomodulation and AAV8+LNP administration.

### Example 7. Use of BCMA×CD3 in Combination with IgG-Degrading Enzyme to Suppress Pre-Existing Anti-AAV nAbs from Natural AAV Exposure and Enable Gene Insertion of an AAV Transgene Template

[1266] In this example, plasma cell depletion with BCMA×CD3 is utilized in combination with IgG degrading enzyme to suppress pre-existing antibody titers to AAV, such as can occur from natural AAV exposure, thereby enabling gene insertion of an AAV transgene template. Cynomolgus macaques with pre-existing total AAV antibody titers and AAV nAb titers ranging from low to high titer, are treated with BCMA×CD3 (REGN5458) with or without CD20×CD3 bispecific antibody (REGN1979 or alternative B cell depletion therapeutic) weekly for several weeks, followed by one or two doses of IgG-degrading enzyme (IdeS or similar). Anti-AAV8 neutralizing and total antibody titers are evaluated biweekly prior to IdeS administration, and daily following IdeS administration. Antibody titers are expected to decline gradually after BCMA×CD3 and BCMA×CD3+CD20×CD3 treatment, but show rapid and greater magnitude decline with additional IdeS treatment, with titers being reduced to sub-neutralizing levels. Monkeys not receiving BCMA×CD3 are not expected to show the same frequency, rate, or magnitude of titer decline. Monkeys are then dosed intravenously with an AAV8 template vector containing a promoterless unidirectional or bidirectional DNA template encoding a therapeutic transgene (e.g., human FIX) and an LNP containing mRNA encoding SpCas9 and a gRNA specific for creating a specific double strand break at a specific monkey genomic locus (e.g., intron 1 of monkey albumin). When transduction and expression of the therapeutic transgene are measured in liver by qPCR, DNA sequencing, and protein ELISA, results are expected to show that only monkeys receiving BCMA×CD3 exhibit productive gene insertion and measurable transgene mRNA and protein, whereas monkeys receiving no BCMA×CD3 fail to achieve AAV transduction, gene insertion, and expression. Monkeys receiving both BCMA×CD3 and IdeS, or BCMA×CD3+IdeS+B cell depletion, are expected to exhibit significantly higher levels of transduction, gene insertion, and expression than BCMA×CD3 treatment alone.

### Example 8. Use of BCMA×CD3 in Combination with IgG-Degrading Enzyme to Suppress Anti-AAV Titers Following Recombinant AAV Exposure to Enable Gene Insertion of an AAV Transgene Template

[1267] In this example, plasma cell depletion with BCMA×CD3 is utilized in combination with IgG degrading enzyme to suppress high-titer pre-existing antibody titers to AAV, such as can occur from exposure to a recombinant AAV gene therapeutic, thereby enabling gene insertion of an AAV transgene template. AAV seronegative cynomolgus macaques are first treated with an AAV8 vector, which is expected to result in a high titer of neutralizing anti-AAV8 antibodies. Several months later, monkeys are treated with BCMA×CD3 (REGN5458) with or without CD20×CD3 bispecific antibody (REGN1979 or alternative B cell depletion therapeutic) weekly for several weeks, followed by one or two doses of IgG-degrading enzyme (IdeS or similar). Anti-AAV8 neutralizing and total antibody titers are evaluated biweekly prior to IdeS administration, and daily following IdeS administration. Antibody titers are expected to decline gradually after BCMA×CD3 and BCMA×CD3+CD20×CD3 treatment, but show rapid and greater magnitude decline with additional IdeS treatment, with titers being reduced to sub-neutralizing levels. Monkeys not receiving BCMA×CD3 are not expected to show the same frequency, rate, or magnitude of titer decline. Monkeys are then dosed intravenously with an AAV8 template vector containing a promoterless unidirectional or bidirectional DNA template encoding a therapeutic transgene (e.g., human FIX) and an LNP containing mRNA encoding SpCas9 and a gRNA specific for creating a specific double strand break at a specific monkey genomic locus (e.g., intron 1 of monkey albumin). When transduction and expression of the therapeutic transgene are measured in liver by qPCR, DNA sequencing, and protein ELISA, results are expected to show that only monkeys receiving BCMA×CD3 exhibit productive gene insertion and measurable transgene mRNA and protein, whereas monkeys receiving no BCMA×CD3 fail to achieve AAV transduction, gene insertion, and expression. Monkeys receiving both BCMA×CD3 and IdeS, or BCMA×CD3+IdeS+B cell depletion, are expected to exhibit significantly higher levels of transduction, gene insertion, and expression than BCMA×CD3 treatment alone.

### Example 9. Use of BCMA×CD3 in Combination with Therapeutic Plasma Exchange to Suppress Pre-Existing Anti-AAV nAbs from Natural AAV Exposure and Enable Gene Insertion of an AAV Transgene Template

[1268] In this example, plasma cell depletion with BCMA×CD3 is utilized in combination with therapeutic plasma exchange (TPE) to suppress pre-existing antibody titers to AAV, such as can occur from natural AAV exposure, thereby enabling gene insertion of an AAV transgene template. Cynomolgus macaques with pre-existing total AAV antibody titers and AAV nAb titers ranging from low to high titer, are treated with BCMA×CD3 (REGN5458) with or without CD20×CD3 bispecific antibody (REGN1979 or alternative B cell depletion therapeutic) weekly for several weeks. Monkeys are then subjected to one or more rounds of TPE. Anti-AAV8 neutralizing and total antibody titers are evaluated prior to and following each round of TPE. Antibody titers are expected to decline gradually after BCMA×CD3 and BCMA×CD3+CD20×CD3 treatment, but show rapid and greater magnitude decline with additional TPE treatment, with titers expected to be reduced to sub-neutralizing levels. Monkeys not receiving BCMA×CD3 are not expected to show the same frequency, rate, or magnitude of titer decline. Monkeys are then dosed intravenously with an AAV8 template vector containing a promoterless unidirectional or bidirectional DNA template encoding a therapeutic transgene (e.g., human FIX) and an LNP containing mRNA encoding SpCas9 and a gRNA specific for creating a specific double strand break at a specific monkey genomic locus (e.g., intron 1 of monkey albumin). When transduction and expression of the therapeutic transgene are measured in liver by qPCR, DNA sequencing, and protein ELISA, results are expected to show that only monkeys receiving BCMA×CD3 exhibit productive gene insertion and measurable transgene mRNA and protein, whereas monkeys receiving no BCMA×CD3 fail to achieve AAV transduction, gene insertion, and expression. Monkeys receiving BCMA×CD3 and TPE, or BCMA×CD3+B cell depletion+TPE, are expected to exhibit significantly higher levels of transduction, gene insertion, and expression than BCMA×CD3 treatment alone.

### Example 10. Use of BCMA×CD3 in Combination with Therapeutic Plasma Exchange to Suppress Anti-AAV Titers Following Recombinant AAV Exposure to Enable Gene Insertion of an AAV Transgene Template

[1269] In this example, plasma cell depletion with BCMA×CD3 is utilized in combination with therapeutic plasma exchange (TPE) to suppress high-titer pre-existing antibody titers to AAV, such as can occur from exposure to a recombinant AAV gene therapeutic, thereby enabling gene insertion of an AAV transgene template. AAV seronegative cynomolgus macaques are first treated with an AAV8 vector, which is expected to result in a high titer of neutralizing anti-AAV8 antibodies. Several months later, monkeys are then treated with BCMA×CD3 (REGN5458) with or without CD20×CD3 bispecific antibody (REGN1979 or alternative B cell depletion therapeutic) weekly for several weeks. Monkeys are then subjected to one or more rounds of TPE. Anti-AAV8 neutralizing and total antibody titers are evaluated prior to and following each round of TPE. Antibody titers are expected to decline gradually after BCMA×CD3 and BCMA×CD3+CD20×CD3 treatment, but show rapid and greater magnitude decline with additional TPE treatment, with titers being reduced to sub-neutralizing levels. Monkeys not receiving BCMA×CD3 are not expected to show the same frequency, rate, or magnitude of titer decline. Several weeks later, monkeys are dosed intravenously with an AAV8 template vector containing a promoterless unidirectional or bidirectional DNA template encoding a therapeutic transgene (e.g., human FIX) and an LNP containing mRNA encoding SpCas9 and a gRNA specific for creating a specific double strand break at a specific monkey genomic locus (e.g., intron 1 of monkey albumin). When transduction and expression of the therapeutic transgene are measured in liver by qPCR, DNA sequencing, and protein ELISA, results are expected to show that only monkeys receiving BCMA×CD3 exhibit productive gene insertion and measurable transgene mRNA and protein, whereas monkeys receiving no BCMA×CD3 fail to achieve AAV transduction, gene insertion, and expression. Monkeys receiving BCMA×CD3 and TPE, or BCMA×CD3+B cell depletion+TPE, are expected to exhibit significantly higher levels of transduction, gene insertion, and expression than BCMA×CD3 treatment alone.

### Example 11. Negative Impact of Efgartigimod on Anti-BCMA×CD3 Serum Drug Concentration, which is Partially Preventable with B Cell Depletion, is Consistent with Cross-Reactive Anti-Drug Antibody Formation

[1270] As described in Example 3, robust bone marrow plasma cell depletion was observed in anti-BCMA×CD3, anti-BCMA×CD3+anti-CD19/CD20, and anti-BCMA×CD3+anti-CD19/CD20+efgartigimod treatment groups that was consistent with the expected mechanism of action of anti-BCMA×CD3 observed in previous studies (Limnander et al. (2023) Sci. Transl. Med. 15(726):eadf9561, herein incorporated by reference in its entirety for all purposes). However, mice treated with anti-BCMA×CD3+efgartigimod, but not anti-CD19/CD20, unexpectedly showed incomplete bone marrow plasma cell depletion (FIG. 6A and FIG. 6F). To better understand the impact of efgartigimod on the efficacy of anti-BCMA×CD3, serum anti-BCMA×CD3 concentrations were evaluated during the immunomodulation treatment period. Repeated injections of anti-BCMA×CD3 in anti-BCMA×CD3 and anti-BCMA×CD3+anti-CD19/20 treatment groups resulted in expected increases in serum concentrations of BCMA×CD3 (FIG. 7). Moreover, mice treated with anti-BCMA×CD3+anti-CD19/20+efgartigimod showed significantly lower levels of serum anti-BCMA×CD3, as expected from the mechanism of action of efgartigimod, which blocks FcRn-mediated recycling of IgG, including recycling of therapeutic IgGs such as anti-BCMA×CD3. However, mice receiving anti-BCMA×CD3+efgartigimod without anti-CD19/20 exhibited an even greater rate of anti-BCMA×CD3 antibody clearance that resulted in complete loss of anti-BCMA×CD3 in serum starting 13 days after the initial efgartigimod dose (FIG. 7).

[1271] A faster clearance rate, reversible with B cell depletion, suggests that a humoral immune response may be contributing to drug clearance via development of anti-drug antibodies. Efgartigimod is a human IgG1 antibody fragment and is known to be immunogenic in mice. Anti-BCMA×CD3 is a human IgG4, which possesses >90% sequence identity to hIgG1. Therefore, it was concluded that efgartigimod, in the absence of additional B cell depletion, induced human IgG1/IgG4 cross-reactive anti-drug antibodies that accelerated anti-BCMA×CD3 clearance. It was further concluded that this anti-drug antibody response, in the absence of additional B cell depletion, negatively impacted BCMA-mediated bone marrow plasma cell depletion and consequently AAV titer reductions. Thus, the contribution of anti-CD19/20 antibodies to the efficacy of anti-BCMA×CD3 in non-human systems, in the presence of efgartigimod, may be model-specific through prevention of a xenogeneic anti-drug antibody response.

### Example 12. Plasma Cell Depletion in Combination with Neonatal Fc Receptor (FcRn) Blockade Potently Reduces Naturally-Occurring AAV Titers in AAV-Seropositive Cynomolgus Macaques

[1272] To evaluate whether plasma cell depletion with anti-BCMA×CD3 could similarly suppress naturally-occurring AAV titers arising from exposure to wild-type AAVs, as is common in humans, a non-human primate study was initiated with AAV8-seropositive macaques. Macaques were divided by AAV neutralizing antibody (nAb) titer into five treatment groups (n=3-5 each), each containing animals of high nAb titer (>1:450), as well as one group of seronegative control animals (n=3). Subsequently, animals were treated with various combinations of a plasma cell-depleting bispecific anti-BCMA×CD3 antibody (REGN5458, 20 mg/kg weekly), a B cell-depleting bispecific anti-CD20×CD3 antibody (REGN1979, 0.1 mg/kg on Study Day 1, 1 mg/kg on Study Days 4, 8, and weekly thereafter), and/or an FcRn blocker (efgartigimod, 20 mg/kg on Study Days 11, 12, 13, 20, and 27). Efgartigimod dosing was delayed relative to REGN5458 and REGN1979 dosing to minimize the impact of efgartigimod on REGN5458 and REGN1979 drug half-life due to FcRn blockade and/or cross-reactive anti-drug antibody development. NAb titers were analyzed weekly by cell-based neutralization assay, conducted by VRL Diagnostics (San Antonio, Texas). A schematic of the study design is shown in FIG. 8.

[1273] Longitudinal analysis of NAb titers revealed that only groups treated with immunomodulation cocktails containing REGN5458 showed substantive geometric mean titer reductions by ˜4 weeks after the start of immunomodulation. Whereas macaques receiving REGN5458-containing cocktails showed titer reductions of >10-fold, macaques receiving a cocktail containing efgartigimod and REGN1979, but not REGN5458, showed only marginal geometric mean nAb titer reduction of ˜2-fold (FIG. 9A). Similar to findings in mice, cocktails containing both a plasma cell depleter (REGN5458) and an FcRn blocker (efgartigimod), or all three immunomodulators, elicited the greatest titer reductions, with the triple combination of REGN5458, REGN1979, and efgartigimod inducing a >100-fold reduction in nAb titer (FIG. 9A). On Study Day 29, two animals in the triple combination group exhibited nAb titers below the limit of detection of the assay (FIG. 9B), suggesting that these animals could be successfully dosed with an AAV vector. Thus, plasma cell depletion is an effective strategy for suppressing naturally-occurring anti-AAV antibody titers, even of high-titer, to a level that is compatible with AAV dosing.

### Example 13. Prophylactic B Cell Depletion with Anti-CD20×CD3 More Effectively Suppresses the Antibody Response to AAV Vectors than Conventional Anti-CD20 Monoclonal Antibodies in Mice

[1274] B cell depletion with rituximab (or anti-CD20 mouse equivalents) has been evaluated in both preclinical and clinical settings as a strategy to prevent the antibody response to AAV and enable AAV vector re-administration. However, in both preclinical and clinical settings, prophylactic treatment with anti-CD20 antibodies has been shown to only partially suppress the antibody response to AAV vectors, and thus have failed to enable re-dosing (Salabarria et al. (2024) J. Clin. Invest. 134(1):e173510, Choi et al. (2023) J. Gene Med. 25(8):e3509, Meliani et al. (2018) Nat. Commun. 9(1):4098, and Unzu et al. (2012) J. Transl. Med., 10:122, each of which is herein incorporated by reference in its entirety for all purposes).

[1275] It was reasoned herein that rituximab and other anti-CD20 monoclonal antibodies may sub-optimally suppress anti-AAV antibody responses due to incomplete B cell depletion in secondary lymphoid tissues, the sites where antibody responses are initiated.

[1276] To test whether anti-CD20×CD3 bispecific antibodies could be more effective at preventing antibody response to AAV, the effectiveness of an anti-CD20×CD3 bispecific antibody (REGN1979) versus a rituximab comparator molecule (“Anti-CD20 COMP”) at suppressing the anti-AAV antibody response to repeated doses of AAV in mice was compared. A schematic of the study design is shown in FIG. 10. Specifically, mice humanized for CD20 and CD3 (gamma, delta, and epsilon chains) were treated prophylactically with two doses of either REGN1979 or anti-CD20 COMP (each 500 μg per mouse subQ (subcutaneously, s.c.)) on Study Days −7 and −4, then weekly for three weeks (250 μg per mouse per dose) starting on Study Day 3 to maintain B cell depletion. A separate group of mice received no B cell depleting agent (“No immunomodulation”). On Study Day 1, an AAV8 vector encoding acid alpha glucosidase fused to a single chain variable fragment targeting human CD63 (hereinafter, “anti-CD63 scFv:GAA”) was dosed intravenously at 3e 1 vector genomes (vg) per kilogram (kg), then subsequently re-administered at the same dose (3e 11 vg/kg) on Study Days 8 and 15. As AAV transduction controls, separate groups of mice were administered a single dose of AAV equal to one, two, or three doses (3e11, 6e11, or 9e11 vg/kg) on Study Day 1 only, in the absence of any B cell depletion agent.

[1277] Antibody titers were evaluated using anti-AAV8 IgM and IgG ELISA. Briefly, 96-well flat-bottom plates were coated with 1e9 vg/well recombinant AAV8 vector in DPBS overnight. The next day, plates were washed and blocked with a milk-based blocking agent (KPL SeraCare Milk Blocking Solution) for 1 hr. Serum samples were then diluted in the same blocker, beginning at an initial dilution of 1:300 followed by three-fold serial dilutions to a final dilution of 53,144,100. Diluted serum was then transferred to the assay plate and incubated overnight at 4° C. The next day, the assay plates were repeatedly washed prior to 1 hr incubation with a polyclonal secondary antibody targeting either mouse IgM (HRP-conjugated AffiniPure Goat Anti-Mouse IgM, μ chain specific, Jackson ImmunoResearch) or mouse IgG (HRP-conjugated anti-mouse Fcγ Fragment, Jackson ImmunoResearch), each diluted 1:5000 in DPBS+0.5% BSA. Plates were again repeatedly washed prior to development with TMB substrate solution. After 15-20 minutes, the reaction was stopped by addition of 2N phosphoric acid. Absorbance at 450 nm (OD450) was measured on a SpectraMax i3 plate reader (Molecular Devices, San Jose, CA). Anti-AAV8 IgM and IgG titers, defined as the dilution factor required to achieve an OD450 reading equal to 2-fold background, were determined and plotted using Prism software (v.10.1, GraphPad, Boston, MA).

[1278] The results showed that AAV IgM titers just prior to AAV re-dose #1 (on Study Day 7) and AAV re-dose #2 (on Study Day 14) were more significantly suppressed in REGN1979-treated mice versus anti-CD20 COMP-treated mice, with REGN1979-treated mice exhibiting geometric mean titers that were essentially at undetectable levels at both timepoints (equivalent to or below that of a control AAV-naïve mouse) (FIG. 11A). By contrast, anti-CD20 COMP-treated mice showed only partial IgM titer suppression at the time of AAV re-dose #1, and no suppression at the time of AAV re-dose #2. Similarly, evaluation of anti-AAV8 IgG titers revealed that REGN1979-treated mice exhibited complete suppression of the anti-AAV8 IgG response at both timepoints, whereas anti-CD20 COMP-treated mice showed clearly detectable IgG titers by Study Day 14 (FIG. 11B). Longitudinal examination of anti-AAV IgG titers showed that REGN1979-treated mice maintained strong IgG titer suppression until study termination (Day 42), whereas anti-CD20 COMP-treated animals eventually mounted a strong IgG response that peaked only slightly below levels of control mice receiving no immunomodulation FIG. 11C. Thus, mice treated with anti-CD20×CD3 bispecific antibody show superior suppression of anti-AAV antibody titers versus mice receiving conventional anti-CD20 monoclonal antibody.

### Example 14. Prophylactic B Cell Depletion with Anti-CD20×CD3, but not Conventional Anti-CD20 Monoclonal Antibody, Enables Systemic AAV8 Vector Re-Administration in Mice

[1279] To evaluate whether the levels of anti-AAV titer suppression achieved by REGN1979 were sufficient to enable AAV re-dosing, mice from Example 13 were sacrificed on Study Day 42 for analysis of AAV transduction in liver. Analysis of AAV vector genomes by digital PCR revealed that REGN1979-treated mice exhibited levels of transduction in liver that were significantly higher than anti-CD20-treated mice and No Immunomodulation controls, and comparable to transduction control animals that received the equivalent of two AAV doses as a single dose (total 6e13 vg/kg) (FIG. 12A). By contrast, anti-CD20-treated mice showed no benefit versus no immunomodulation mice, failing to achieve meaningful levels of re-transduction. Transgene RNA expression analysis in liver (by RT-qPCR), and protein expression in serum (by ELISA) showed similar findings, with REGN1979-treated mice again exhibiting significantly higher levels of liver transgene RNA and protein expression versus anti-CD20-treated mice, at levels between that of transduction control mice receiving the equivalent of 2 or 3 AAV doses as a single dose (FIGS. 12B-12C). Taken together, these findings demonstrate that prophylactic B cell depletion with anti-CD20×CD3 bispecific antibody, but not conventional anti-CD20 monoclonal antibody, allows for successful AAV vector re-administration.

### Example 15. Prophylactic B Cell Depletion with Anti-CD20×CD3 Fully Suppresses the IgM, IgG, and Neutralizing Antibody (NAb) Response to AAV in Non-Human Primates

[1280] Previous reports have shown that B cell depletion with rituximab is insufficient to prevent antibody responses to systemic AAV in non-human primates, and ultimately fails to enable re-dosing (Unzu et al. (2012) J. Transl. Med., 10:122, herein incorporated by reference in its entirety for all purposes). It was thus investigated whether more potent B cell depletion with anti-CD20×CD3 bispecific antibody could achieve superior suppression of the antibody response post-AAV dosing, to levels that would facilitate re-dosing.

[1281] AAV8-seronegative cynomolgus macaques received either no immunomodulation (n=4) or anti-CD20×CD3 bispecific antibody (REGN1979, 0.1 mg/kg initial dose then 0.5 mg/kg weekly for 5 weeks; n=6). After three initial doses of REGN1979, animals in both groups were administered AAV8 CAG eGFP (“AAV #1”) intravenously (i.v.) at 1e13 vector genomes per kilogram (vg/kg). A third group was not administered the 1st AAV (“AAV #2 only”; n=6). Blood was sampled for 10 weeks for longitudinal antibody titer analysis. A schematic of the study design is shown in FIG. 13.

[1282] Analysis of anti-AAV IgM, IgG, and neutralizing antibody (nAb) titers was conducted by AAV titer ELISA or cell-based neutralization assay, according to standard methods known in the art. Results indicated that, as expected, macaques receiving no immunomodulation mounted a robust AAV8 IgM, IgG, and nAb response after the first AAV exposure (FIGS. 14A-14C). Strikingly, however, prophylactic B cell depletion with REGN1979 completely prevented an IgM, IgG, and nAb response for the entire 10-week analysis period (FIGS. 14A-14C). Individual animal IgM, IgG, and nAb titer data are shown for Study Day 71, 5 days prior to AAV re-dosing, in FIGS. 14D-14F. Thus, these data indicate that prophylactic B cell depletion with anti-CD20×CD3 bispecific antibody can fully prevent the antibody response to AAV in non-human primates, in contrast to comparable studies evaluating a conventional anti-CD20 therapeutic (rituximab), which failed to prevent the anti-AAV NAb response (Unzu et al. (2012) J. Transl. Med., 10:122, herein incorporated by reference in its entirety for all purposes).

### Example 16. Prophylactic B Cell Depletion with Anti-CD20×CD3 Enables Systemic AAV Re-Dosing in Non-Human Primates

[1283] Next was evaluated whether the level of anti-AAV antibody titer suppression achieved in anti-CD20×CD3-treated macaques (described in Example 15) was sufficient to enable systemic AAV re-dosing. All animals (including “AAV #2 only” animals that had not received AAV #1) were intravenously (i.v.) administered a second AAV8 vector (“AAV #2”) encoding a secreted human IgG1 monoclonal antibody expressed from a liver-specific promoter at 1e13 vg/kg. Four weeks later, animals were necropsied, and liver transduction was evaluated by digital PCR. As expected, few detectable vector genomes per diploid genome were observed in control animals that previously received AAV #1 but no immunomodulation (FIG. 15A). By contrast, anti-CD20×CD3-treated macaques achieved robust transduction approaching that of previously-naïve control animals (“AAV #2 only”). Similarly, transgene mRNA (FIG. 15B) and hIgG1 protein (FIG. 15C) were readily detectable in liver and serum by RT-qPCR and ELISA, respectively, from CD20×CD3-treated and AAV #2 single-dosed control animals, but not re-dosed control animals that received no immunomodulation. Taken together, these findings show that systemic AAV vector re-administration is achievable via B cell depletion with bispecific anti-CD20×CD3 antibody, likely due to the deeper level of B depletion achievable in lymph nodes by this approach versus conventional anti-CD20 therapeutics.

### Example 17. Use of Anti-BCMA×CD3 in Combination with FcRn Antagonist to Suppress Pre-Existing Anti-AAV NAbs Resulting from Wild-Type AAV Exposure and Enable AAV-Mediated Gene Insertion

[1284] In this example, plasma cell depletion with anti-BCMA×CD3 is utilized in combination with FcRn antagonist to suppress pre-existing antibody titers to AAV arising from natural AAV exposure, and consequently enable gene insertion of an AAV transgene template. Cynomolgus macaques are divided by AAV neutralizing antibody (NAb) titer into several treatment groups, each containing animals that are AAV NAb seropositive (NAb titer>1:20), as well as one group of seronegative control animals (n=3). Subsequently, animals are treated with various combinations of a plasma cell-depleting bispecific anti-BCMA×CD3 antibody (REGN5458, 20 mg/kg weekly), a B cell-depleting bispecific anti-CD20×CD3 antibody (REGN1979, 0.1 mg/kg on Study Day 1, 1 mg/kg on Study Days 4, 8, and weekly thereafter), and/or an FcRn blocker (efgartigimod, 20 mg/kg on Study Days 11, 12, 13, 20, and 27). Efgartigimod dosing is delayed relative to REGN5458 and REGN1979 dosing to minimize the impact of efgartigimod on REGN5458 and REGN1979 drug half-life, due to FcRn blockade and/or cross-reactive monkey anti-human IgG antibody development. NAb titers are analyzed weekly by cell-based AAV neutralization assay, according to standard procedures in the field. Longitudinal analysis of AAV NAb titers reveals that all groups treated with REGN5458, or combinations thereof, show measurable NAb titer reductions. Animals treated with both REGN5458 and efgartigimod show more rapid and deep titer reductions than REGN5458 alone during the five week analysis period, due to accelerated turnover of IgGs resulting from FcRn blockade. Animals treated with all three agents (REGN5458, efgartigimod, and REGN1979) show the deepest reductions in titer, due to REGN1979-mediated B cell depletion, which both blocks development of cross-reactive anti-human IgG antibodies that limit the efficacy of efgartigimod and REGN5458 in monkeys, and eliminates AAV-specific antibody-secreting cells that are not depleted with REGN5458. Animals with lower starting NAb titers (approximately ≤1:100) drop to undetectable levels by Study Day 35 in all treatment groups containing REGN5458. Animals with moderate starting NAb titers (approximately >100 to ≤1:400) drop to undetectable levels by Study Day 35 in all treatment groups containing REGN5458 and efgartigimod. Animals with high starting NAb titers (approximately >1:400) drop to undetectable levels by Study Day 35 in the REGN5458+REGN1979+efgartigimod group.

[1285] On Study Day 36, control AAV8 seronegative animals, control AAV8 seropositive animals, and immunomodulation-treated animals are dosed intravenously at 1.5e13 vg/kg with a liver-tropic AAV8 vector containing a promoterless bidirectional DNA template encoding human FIX. The animals are also dosed intravenously with an LNP (1 mg/kg) encapsulating both an mRNA encoding SpCas9 and a gRNA specific for intron 1 of the Macaca fascicularis albumin gene. This strategy induces a double-strand break, insertion of the AAV template, and splicing of hFIX transgene mRNA to albumin exon 1, resulting in stable protein expression and secretion of hFIX. Subsequent analysis of liver transgene insertion by dPCR shows that REGN5458-treated animals that achieved undetectable NAb titers exhibit successful gene insertion at albumin intron 1, at roughly equivalent levels to positive control AAV seronegative animals. Analysis of transgene mRNA by RT-qPCR of liver biopsies show detectable hFIX transcript, at an equivalent level to previously AAV-naïve animals. Analysis of hFIX protein in plasma by ELISA reveals successful protein secretion into the blood at readily detectable levels, at equivalent levels to positive control AAV seronegative animals. Thus, anti-BCMA×CD3, and combination treatments thereof, can enable successful AAV-mediated gene insertion in the context of pre-existing NAbs from wild-type AAV exposure.

### Example 18. Use of Anti-BCMA×CD3 to Enable Repeated AAV-Mediated Gene Insertion of a Transgene into a Single Genetic Locus

[1286] Anti-BCMA×CD3-mediated plasma cell depletion can allow for repeat gene insertion of an AAV template into a single genetic locus. In this example, BCMA-, CD3gamma-, CD3-delta, and CD3-epsilon humanized mice are intravenously treated with an AAV8 template vector containing a promoterless bidirectional DNA template encoding human FIX transgene (hFIX) at 5e12 vg/kg on Study Day 1. Simultaneously, the mice are dosed intravenously with an LNP (0.5 mg/kg) encapsulating both an mRNA encoding SpCas9 and a gRNA specific for intron 1 of the mouse albumin gene, resulting in a double-strand break and insertion of the AAV hFIX template into mouse hepatocytes. Splicing of hFIX transgene mRNA to mouse albumin exon 1 results in stable protein expression and secretion of hFIX into the blood, detectable by ELISA in mouse plasma samples collected one month after AAV treatment. On Study Day 60, all AAV-treated mice are evaluated for anti-AAV8 IgG titers and are confirmed to possess high titers (>1:10,000). On Study Day 70, mice are divided into several treatment groups receiving either anti-BCMA×CD3 (REGN5458, 25 mg/kg weekly for five weeks), FcRn blocker (efgartigimod alfa, 20 mg/kg weekly for five weeks), and/or B cell depletion (anti-CD20+anti-CD19 antibody cocktail, 20 mg/kg each, weekly for five weeks), individually or in combination. In groups receiving efgartigimod in combination with REGN5458 and/or B cell depleting antibodies, the first efgartigimod dose is omitted. As controls, some mice are not treated with immunomodulation. Anti-AAV8 IgG titers are measured longitudinally by ELISA. Results show that by Study Day 105, all mice treated with REGN5458 show some reduction in anti-AAV8 IgG titer over the five-week treatment and analysis period. This reduction is more significant and rapid in mice that additionally receive efgartigimod, with some animals exhibiting undetectable anti-AAV8 IgG titers by Study Day 105. Mice receiving triple combination of REGN5458, efgartigimod, and anti-CD19/20 antibodies, show even more rapid and deep anti-AAV8 IgG titer reductions, with all mice exhibiting undetectable NAb titers by Study Day 105. Mice not receiving REGN5458 show only minor or negligible anti-AAV8 IgG titer decline. On Study Day 105, mice are treated intravenously with the same AAV8 template vector and LNP that was initially administered on Study Day 1, at the same dose, and in the same manner, to achieve increased levels of gene insertion at the same gene locus in mouse hepatocytes that had not previously been edited on the first dose. Mice are necropsied on Study Day 135 for analysis of transgene insertion and transgene expression. Analysis of liver transgene insertion by dPCR shows that REGN5458-treated animals that achieved undetectable anti-AAV8 IgG titers, including all mice in the REGN5458+efgartigimod+anti-CD19/20 antibody treatment group, exhibit gene insertion levels that are approximately double that of control mice that received only one dose of AAV8 hFIX template and LNP. Similarly, analysis of transgene mRNA in liver and protein in plasma by RT-qPCR and hFIX ELISA, respectively, show approximately double the level of expression as mice that received only a single dose of AAV8 hFIX template+LNP, indicating a successful second hFIX gene insertion treatment. By contrast, mice that received no immunomodulation, or immunomodulation that did not contain REGN5458, show the same level of gene insertion, hFIX transcript, and hFIX protein as control mice that received only a single dose of AAV8 hFIX template+LNP, indicating unsuccessful second hFIX gene insertion treatment. Thus, anti-BCMA×CD3, in combination with FcRn antagonism and B cell depletion, can successfully suppress pre-existing AAV8 IgGs resulting from previous AAV vector administration, thereby enabling repeat AAV-mediated gene insertion events at the same locus, with the same transgene.

### Example 19. Use of Anti-BCMA×CD3 to Enable Sequential AAV-Mediated Gene Insertion of Two Different Transgenes into Two Different Genetic Loci

[1287] Anti-BCMA×CD3-mediated plasma cell depletion can allow for repeat gene insertion of different AAV templates into separate genetic loci. In this example, BCMA-, CD3gamma-, CD3-delta, and CD3-epsilon humanized mice are intravenously treated with an AAV8 template vector containing a promoterless bidirectional DNA template encoding human FIX transgene (hFIX) at 1.5e13 vg/kg on Study Day 1. Simultaneously, animals are dosed intravenously with an LNP (1 mg/kg) encapsulating both an mRNA encoding SpCas9 and a gRNA specific for intron 1 of the mouse albumin gene, resulting in a double-strand break and insertion of the AAV hFIX template into mouse hepatocytes. Splicing of hFIX transgene mRNA to mouse albumin exon 1 results in stable protein expression and secretion of hFIX into the blood, detectable by ELISA in mouse plasma samples collected one month after AAV treatment. On Study Day 60, all AAV-treated mice are evaluated for anti-AAV8 IgG titers and are universally found to possess high titers (>1:10,000). On Study Day 70, mice are divided into several treatment groups receiving either anti-BCMA×CD3 (REGN5458, 25 mg/kg weekly for five weeks), FcRn blocker (efgartigimod alfa, 20 mg/kg weekly for five weeks), and/or B cell depletion (anti-CD20+anti-CD19 antibody cocktail, 20 mg/kg each, weekly for five weeks), individually or in combination. In groups receiving efgartigimod in combination with REGN5458 and/or B cell depleting antibodies, the first efgartigimod dose is omitted. As controls, some mice are not treated with immunomodulation. Anti-AAV8 IgG titers are measured longitudinally by ELISA. Results show that by Study Day 105, all mice treated with REGN5458 show some reduction in anti-AAV8 IgG titer over the five-week treatment and analysis period. This reduction is more significant and rapid in mice that additionally receive efgartigimod, with some animals exhibiting undetectable anti-AAV8 IgG titers by Study Day 105. Mice receiving triple combination of REGN5458, efgartigimod, and anti-CD19/20 antibodies, show even more rapid and deep anti-AAV8 IgG titer reductions, with all mice exhibiting undetectable NAb titers by Study Day 105. Mice not receiving REGN5458 show only minor or negligible IgG titer decline. On Study Day 105, mice are treated intravenously at 1.5e13 vg/kg with a second AAV8 vector containing a promoterless, unidirectional template encoding a human IgG monoclonal antibody. At the same time, mice are intravenously administered a second, distinct LNP encapsulating mRNA transcript for SpCas9 as well as a gRNA targeting a second safe harbor site within the genome. This creates another double strand break and facilitates a second gene insertion event in hepatocytes at a distinct locus. Expression of the second transgene occurs via splicing of the transgene coding sequence to the exon containing the protein secretion signal. As positive controls for gene insertion, separate groups of mice receive either only the first AAV vector+LNP or the second AAV vector+LNP. Mice are necropsied on Study Day 135 for analysis of transgene insertion and transgene expression. Analysis of liver transgene insertion by dPCR shows that REGN5458-treated mice that achieved undetectable anti-AAV8 IgG titers, including all mice in the REGN5458+efgartigimod+anti-CD19/20 antibody treatment group, exhibit levels of gene insertion at both sites equivalent to positive control mice (previously AAV-naïve mice that received only single dose of either AAV8 hFIX template+LNP or AAV8 hIgG1 template+LNP). Similarly, analysis of transgene mRNA in liver and protein in plasma by RT-qPCR and ELISA, respectively, reveals levels of both hFIX and hIgG1 transcript and protein that match positive control mice. By contrast, mice that received no immunomodulation, or immunomodulation that did not contain REGN5458, display no evidence of successful hIgG1 gene insertion or transgene expression. Thus, anti-BCMA×CD3, and combination treatments thereof, can successfully suppress pre-existing AAV8 IgGs resulting from previous AAV vector administration, thereby enabling repeat AAV-mediated gene insertion of different transgenes at different genetic loci.

### Example 20. Use of Anti-BCMA×CD3 in Combination with IgG-Degrading Enzyme to Suppress Pre-Existing Anti-AAV NAbs from Natural AAV Exposure and Enable AAV-Mediated Gene Insertion

[1288] Plasma cell depletion with anti-BCMA×CD3 can be utilized in combination with IgG-degrading enzyme (IdeS) to suppress pre-existing antibody titers to AAV arising from natural AAV exposure and consequently enable AAV-mediated gene insertion. In this example, two groups of AAV8-seropositive cynomolgus macaques of moderate to high NAb titer (≥1:300) are treated with two intravenous doses of REGN5458 at 20 mg per kg, one week apart (Study Days 1 and 8), to deplete plasma cells. Separately, two additional groups of seropositive animals with roughly equivalent AAV NAb titer distribution receive no REGN5458. On Study Day 15, one of the REGN5458-treated groups, and one of the untreated groups, receives an intravenous dose of IgG-degrading enzyme (IdeS) at 2 mg per kg. AAV NAb titers are evaluated three days later (Study Day 18) by cell-based AAV transduction assay, using standard practices in the field. These data show that animals receiving REGN5458 alone show reductions in AAV NAb titer, but still exhibit detectable NAbs. Similarly, animals that did not receive REGN5458 but subsequently received IdeS show reductions in NAb titers, but retain AAV NAbs at levels sufficient for AAV neutralization (≥1:20). By contrast, animals that received both REGN5458 and IdeS in sequence show undetectable NAb titers on Study Day 18. On Study Day 19, all animals (including seronegative control animals) are dosed intravenously at 1.5e13 vg/kg with a liver-tropic AAV8 vector containing a promoterless bidirectional DNA template encoding human FIX, as well as an LNP (1 mg/kg) encapsulating both an SpCas9 mRNA and a gRNA specific for intron 1 of the Macaca fascicularis albumin gene. This strategy is designed to induce a double-strand break and insertion of the AAV template, while subsequent RNA splicing of hFIX transgene coding sequence to albumin exon 1 results in stable protein expression and secretion of hFIX. Upon analysis of liver transgene insertion by dPCR, only animals receiving the combination of REGN5458+IdeS show levels of insertion approaching or equivalent to previously AAV-naïve (seronegative) animals. Similarly, when hFIX RNA levels are interrogated in liver biopsies by RT-qPCR, and hFIX protein levels by ELISA of plasma, only animals treated with REGN5458+IdeS show levels approaching or equivalent to previously AAV-naïve (seronegative) animals. Thus, sequential treatment with anti-BCMA×CD3 and IdeS can enable AAV-mediated gene insertion in the context of pre-existing NAbs resulting from wild-type AAV exposure.

### Example 21. Use of Anti-BCMA×CD3 in Combination with IgG-Degrading Enzyme to Suppress Anti-AAV Nab Titers Following Recombinant AAV Exposure to Enable AAV-Mediated Gene Insertion

[1289] Plasma cell depletion with anti-BCMA×CD3 can be utilized in combination with IgG-degrading enzyme (IdeS) to suppress NAb titers arising after exposure to a recombinant AAV therapeutic to enable successful AAV-mediated gene insertion. In this example, cynomolgus macaques are treated with an AAV8 GFP vector on Study Day 1. Subsequent NAb analysis on Study Day 60 reveals that all animals developed high anti-AAV8 NAb titers (>1:400). Subsequently, the animals are divided into four separate groups. Two of the groups are treated with two intravenous doses of REGN5458 at 20 mg per kg, one week apart (Study Days 67 and 74), to deplete plasma cells. Separately, two additional groups with roughly equivalent AAV NAb titer distribution receive no REGN5458. On Study Day 81, one of the REGN5458-treated groups, and one untreated group, receives an intravenous dose of IgG-degrading enzyme (IdeS) at 2 mg per kg. AAV NAb titers are evaluated three days later (Study Day 84) by cell-based AAV transduction inhibition assay, using standard practices in the field. These data show that animals receiving REGN5458 alone show reductions in AAV NAb titer, but still exhibit detectable NAbs. Similarly, animals that did not receive REGN5458 but subsequently received IdeS show reductions in NAb titers, but retain AAV NAbs at levels sufficient for AAV neutralization (≥1:20). By contrast, animals that received REGN5458 and then subsequently received IdeS on Study Day 81 show undetectable NAb titers on Study Day 84. On Study Day 85, all animals (including seronegative control animals) are dosed intravenously at 1.5e13 vg/kg with a liver-tropic AAV8 vector containing a promoterless bidirectional DNA template encoding human FIX, as well as an LNP (1 mg/kg) encapsulating both an SpCas9 mRNA and a gRNA specific for intron 1 of the Macaca fascicularis albumin gene. This strategy is designed to induce a double-strand break and insertion of the AAV template, while subsequent RNA splicing of hFIX transgene coding sequence to albumin exon 1 results in stable protein expression and secretion of hFIX. Upon analysis of liver transgene insertion by dPCR, only animals receiving the combination of REGN5458+IdeS show levels of insertion approaching or equivalent to previously AAV-naïve (seronegative) animals. Similarly, when hFIX RNA levels are interrogated in liver biopsies by RT-qPCR, and hFIX protein levels by ELISA of plasma, only animals treated with REGN5458+IdeS show levels approaching or equivalent to previously AAV-naïve (seronegative) animals. Thus, sequential treatment with anti-BCMA×CD3 and IdeS can enable AAV-mediated gene insertion in the context of high titer pre-existing NAbs resulting from a previous recombinant AAV exposure, such as AAV gene therapy or AAV-mediated gene editing.

### Example 22. Use of Anti-BCMA×CD3 in Combination with Therapeutic Plasma Exchange (TPE) to Suppress Pre-Existing Anti-AAV nAbs from Natural AAV Exposure and Enable AAV-Mediated Gene Insertion

[1290] Plasma cell depletion with anti-BCMA×CD3 can be utilized in combination with therapeutic plasma exchange (TPE) to suppress pre-existing antibody titers to AAV arising from natural AAV exposure and consequently enable AAV-mediated gene insertion. In this example, two groups of AAV8-seropositive cynomolgus macaques of moderate to high NAb titer (>1:300) are treated with two intravenous doses of REGN5458 at 20 mg per kg, one week apart (Study Days 1 and 8), to deplete plasma cells. Separately, two additional groups of seropositive animals with roughly equivalent AAV NAb titer distribution receive no REGN5458. On Study Day 15, one of the REGN5458-treated groups, and one of the untreated groups, undergoes multiple rounds of therapeutic plasma exchange (3 to 4 cycles in total), according to standard practice. Immediately following TPE, blood is drawn from all animals (including those that did not undergo TPE) for NAb evaluation by cell-based AAV transduction inhibition assay, according to standard practices in the field. These data show that animals receiving REGN5458 alone, but not TPE, show reductions in AAV8 NAb titer, and still exhibit detectable NAbs. Similarly, animals that did not receive REGN5458 but received TPE show reductions in AAV8 NAb titers, but retain AAV NAbs at levels sufficient for AAV neutralization (≥1:20). By contrast, animals that received REGN5458 and then TPE in sequence show undetectable AAV8 NAb titers on Study Day 18. Shortly following the completion of TPE, but after the blood draw, all animals (including seronegative control animals) are dosed intravenously at 1.5e13 vg/kg with a liver-tropic AAV8 vector containing a promoterless bidirectional DNA template encoding human FIX, as well as an LNP (1 mg/kg) encapsulating both an SpCas9 mRNA and a gRNA specific for intron 1 of the Macaca fascicularis albumin gene. This strategy is designed to induce a double-strand break and insertion of the AAV template, while subsequent RNA splicing of hFIX transgene coding sequence to albumin exon 1 results in stable protein expression and secretion of hFIX. Upon analysis of liver transgene insertion by dPCR, only animals receiving the combination of REGN5458+TPE show levels of insertion approaching or equivalent to previously AAV-naïve (seronegative) animals. Similarly, when hFIX RNA levels are interrogated in liver biopsies by RT-qPCR, and hFIX protein levels by ELISA of plasma, only animals treated with REGN5458+TPE show levels approaching or equivalent to previously AAV-naïve (seronegative) animals. Thus, sequential treatment with anti-BCMA×CD3 and TPE can enable AAV-mediated gene insertion in the context of pre-existing NAbs resulting from wild-type AAV exposure.

### Example 23. Use of Anti-BCMA×CD3 in Combination with Therapeutic Plasma Exchange (TPE) to Suppress Anti-AAV NAb Titers Following Recombinant AAV Exposure to Enable AAV-Mediated Gene Insertion

[1291] Plasma cell depletion with anti-BCMA×CD3 can be utilized in combination with therapeutic plasma exchange (TPE) to suppress AAV NAb titers arising after exposure to a recombinant AAV therapeutic and enable successful AAV-mediated gene insertion. In this example, cynomolgus macaques are treated with an AAV8 GFP vector on Study Day 1. Subsequent NAb analysis on Study Day 60 reveals that all animals developed high anti-AAV8 NAb titers (>1:400). Subsequently, the animals are divided into four separate groups. Two of the groups are treated with two intravenous doses of REGN5458 at 20 mg per kg, one week apart (Study Days 67 and 74), to deplete plasma cells. Separately, two additional groups of seropositive animals with roughly equivalent AAV NAb titer distribution receive no REGN5458. On Study Day 81, one of the REGN5458-treated groups, and one untreated group, undergoes multiple rounds of therapeutic plasma exchange (3 to 4 cycles in total), according to standard practice. Immediately following TPE, blood is drawn for NAb evaluation by cell-based AAV transduction inhibition assay, according to standard practices in the field. These data show that animals receiving REGN5458, but not TPE, show reductions in AAV NAb titer, and still exhibit detectable NAbs. Similarly, animals that did not receive REGN5458 but receive TPE show reductions in NAb titers, but retain AAV NAbs at levels sufficient for AAV neutralization (≥1:20). By contrast, animals that received REGN5458 and TPE in sequence show undetectable NAb titers on Study Day 18. Shortly following the completion of TPE, but after the blood draw, all animals (including seronegative control animals) are dosed intravenously at 1.5e13 vg/kg with a liver-tropic AAV8 vector containing a promoterless bidirectional DNA template encoding human FIX, as well as an LNP (1 mg/kg) encapsulating both an SpCas9 mRNA and a gRNA specific for intron 1 of the Macaca fascicularis albumin gene. This strategy is designed to induce a double-strand break and insertion of the AAV template, while subsequent RNA splicing of hFIX transgene to albumin exon 1 results in stable protein expression and secretion of hFIX. Upon analysis of liver transgene insertion by dPCR, only animals receiving the combination of REGN5458+TPE show levels of insertion approaching or equivalent to previously AAV-naïve (seronegative) animals. Similarly, when hFIX RNA levels are interrogated in liver biopsies by RT-qPCR, and hFIX protein levels by ELISA of plasma, only animals treated with REGN5458+TPE show levels approaching or equivalent to previously AAV-naïve (seronegative) animals. Thus, sequential treatment with anti-BCMA×CD3 and TPE can enable AAV-mediated gene insertion in the context high titer pre-existing NAbs resulting from a previous recombinant AAV exposure, such as AAV gene therapy or AAV-mediated gene editing.

### Example 24. Prophylactic Anti-CD20×CD3-Mediated B Cell Depletion for Enabling Repeated, Titratable Gene Insertion at the Same Locus with the Same AAV Vector

[1292] Prophylactic B cell depletion with anti-CD20×CD3 bispecific antibody can be used to prevent or mitigate an anti-AAV antibody response and allow for repeated, titratable dosing of a gene insertion therapeutic over the span of days, weeks, months, or years. This approach enables a single larger dose to be divided over two or more smaller doses to optimize for therapeutic levels of transgene expression, while also minimizing risk for dose-related toxicities.

[1293] In this example, mice are prophylactically dosed with anti-CD20×CD3 antibody (REGN1979) to systemically deplete B cells and enable repeated, titratable AAV-mediated gene insertion of the same transgene at the same genetic locus. Specifically, AAV-naïve/seronegative CD20- and CD3-humanized mice are dosed on Study Days −7 and −3 with two doses of REGN1979 subcutaneously at 500 μg per mouse to deplete B cells, then weekly thereafter at 250 μg per mouse to maintain B cell depletion. For comparison, additional groups of mice receive a B cell depleting anti-CD20 monoclonal antibody at equivalent doses to REGN1979, or no immunomodulation. On Study Day 0, an AAV8 vector encoding a promoterless, bidirectional DNA template encoding human Factor IX (hFIX) is administered intravenously at 5e12 vg/kg, one-third the optimal therapeutic dose. At the same time, a lipid nanoparticle (LNP) encapsulating both an mRNA transcript for SpCas9 as well as a gRNA targeting exon 1 of the mouse albumin gene is also dosed intravenously at 0.33 mg/kg, one-third the optimal therapeutic dose. This creates a double strand break and facilitates insertion of the hFIX cassette into the albumin locus in hepatocytes. Splicing of the hFIX coding sequence to albumin exon 1 leads to stable hFIX expression and secretion into the blood. Human FIX transgene protein expression is evaluated in mouse plasma by ELISA a week later. Subsequently, the same AAV and LNP are dosed a second time, in the same manner and dose, and hFIX levels are again measured in plasma a week later. Then, the same AAV and LNP are dosed a third time, in the same manner and dose, and hFIX levels are measured in plasma a week later. These plasma hFIX protein measurements reveal that each AAV and LNP administration resulted in discrete and approximately equivalent increases in hFIX levels, and the target therapeutic level of FIX is achieved after the third AAV+LNP cycle. Analysis of gene insertion by dPCR one week after the third AAV+LNP administration reveals that REGN1979 pre-treated mice receiving three separate AAV+LNP doses have approximately three times the AAV genomes and gene insertion levels as control mice receiving a single AAV+LNP dose, and approximately equivalent levels to mice receiving the full therapeutic AAV+LNP dose as a single dose. Analysis of transgene expression by qPCR matches transduction and gene insertion findings. Control mice that received repeated AAV and LNP dosing but did not receive REGN1979 pre-treatment, or received conventional anti-CD20 B cell depleting monoclonal antibody, exhibit gene insertion, RNA expression levels, and hFIX plasma protein levels equivalent to control mice receiving one-third of the optimal therapeutic dose, thereby showing no evidence of successful gene insertion beyond the first AAV+LNP treatment. Longitudinal analysis of anti-AAV8 IgM and IgG antibody titers show that REGN1979 pre-treated mice receiving repeated doses of AAV+LNP show minimal increase in antibody titers relative to baseline. By contrast, mice receiving AAV with anti-CD20 antibody, or receiving no immunomodulation, show robust anti-AAV8 IgM and IgG antibody responses. Thus, these data show that by preventing the anti-AAV IgM and IgG antibody response, anti-CD20×CD3 bispecific antibody pre-treatment, but not conventional anti-CD20 monoclonal antibodies, can enable titratable increases in AAV gene insertion via repeated administration of the same AAV template and LNP, until the desired therapeutic level of transgene expression is achieved.

### Example 25. Prophylactic Anti-CD20×CD3-Mediated B Cell Depletion for Enabling Repeated Gene Insertion of the Same Transgene at Different Loci

[1294] In this example, mice are prophylactically dosed with anti-CD20×CD3 antibody (REGN1979) to enable repeated AAV-mediated gene insertion of the same transgene at the distinct genetic loci. Specifically, AAV-naïve/seronegative CD20- and CD3-humanized mice are dosed on Study Days −7 and −3 with two doses of REGN1979 subcutaneously at 500 μg per mouse to deplete B cells, then weekly thereafter at 250 μg per mouse to maintain B cell depletion. For comparison, additional groups of mice receive a B cell depleting anti-CD20 monoclonal antibody at equivalent doses to REGN1979, or no immunomodulation. On Study Day 0, an AAV8 vector encoding a promoterless, bidirectional DNA template encoding human Factor IX (hFIX) is administered intravenously at 7.5e12 vg/kg. At the same time, a lipid nanoparticle (LNP) encapsulating both mRNA transcript for SpCas9 as well as a gRNA targeting exon 1 of the mouse albumin gene is also dosed intravenously at 0.5 mg/kg. This creates a double strand break and facilitates insertion of the hFIX cassette into the albumin locus in hepatocytes. Splicing of the hFIX coding sequence to albumin exon 1 leads to stable hFIX expression and secretion into the blood. Human FIX transgene protein expression is evaluated in mouse plasma by ELISA two weeks later and hFIX is readily detectable at expected therapeutic levels. On Study Day 30, a second AAV8 vector also containing a promoterless DNA template encoding hFIX is administered intravenously at 7.5e12 vg/kg. At the same time, mice are intravenously administered at 0.5 mg/kg a second, distinct LNP encapsulating mRNA transcript for SpCas9 and a gRNA targeting a second safe harbor site within the genome. This creates another double strand break and facilitates a second gene insertion event in hepatocytes. Expression of the second hFIX transgene occurs via splicing of the hFIX coding sequence to an exon containing a protein secretion signal. As positive controls for gene insertion, separate groups of mice receive either the first AAV+LNP vector or the second AAV+LNP vector only. Digital PCR analysis of gene insertion at both loci reveals that anti-CD20×CD3 pre-treated mice show successful gene insertion of hFIX at both loci at levels equivalent to positive controls. Transgene RNA expression measured by qPCR show twice as much hFIX transcript in anti-CD20×CD3-treated, re-dosed animals vs. single-dosed AAV+LNP control animals. Longitudinal plasma hFIX protein measurements show discrete and approximately equivalent increases in hFIX levels after each AAV and LNP administration, and terminal hFIX levels that are approximately twice that of single-dosed AAV+LNP control animals. By contrast, mice treated with anti-CD20 antibody or no immunomodulation show minimal to no detectable hFIX insertion at the second locus, and exhibit hFIX transcript and protein levels equivalent to single-dosed AAV+LNP control animals, indicating unsuccessful re-dosing. Longitudinal analysis of anti-AAV8 IgM and IgG antibody titers show that anti-CD20×CD3 pre-treated mice mounted minimal increase in antibody titers relative to baseline. By contrast, mice receiving AAV with anti-CD20 antibody, or receiving no immunomodulation, show robust anti-AAV8 IgM and IgG antibody responses. Thus, these data show that by preventing the anti-AAV IgM and IgG antibody response, anti-CD20×CD3 bispecific antibody pre-treatment, but not pre-treatment with conventional anti-CD20 monoclonal antibodies, can enable repeat AAV gene insertion of the same transgene at two distinct loci.

### Example 26. Anti-CD20×CD3-Mediated B Cell Depletion for Enabling AAV-Mediated Gene Insertion of Distinct Transgenes into Different Genetic Loci

[1295] In this example, mice are prophylactically dosed with anti-CD20×CD3 antibody (REGN1979) to enable repeated AAV-mediated gene insertion of two different therapeutic transgenes at different genetic loci. Specifically, AAV-naïve/seronegative CD20- and CD3-humanized mice are dosed on Study Days −7 and −3 with two doses of REGN1979 subcutaneously at 500 μg per mouse, then weekly thereafter at 250 μg per mouse to maintain B cell depletion. On Study Day 0, an AAV8 vector containing a promoterless, bidirectional DNA template encoding hFIX transgene is administered intravenously at 1.5e13 vg/kg. Simultaneously, a lipid nanoparticle (LNP) encapsulating both an mRNA transcript for SpCas9 as well as a gRNA targeting exon 1 of the albumin gene is also dosed intravenously at 1 mg/kg. This creates a double strand break and facilitates gene insertion at the albumin locus in hepatocytes. Splicing of the hFIX coding sequence to albumin exon 1 leads to stable hFIX expression and secretion into the blood. One month later, mice are intravenously administered at 1.5e13 vg/kg a second AAV8 vector encoding a human IgG1 monoclonal antibody. At the same time, mice are intravenously administered at 1 mg/kg a second LNP encapsulating mRNA transcript for SpCas9 as well as a distinct gRNA targeting a second safe harbor site within the genome. This creates another double-strand break and facilitates a second gene insertion event in hepatocytes at a distinct locus. Expression of the second transgene occurs via splicing of the hIgG1 transgene coding sequence to an exon containing a protein secretion signal. As positive controls for gene insertion, separate groups of mice receive either only the first AAV+LNP vector or the second AAV+LNP vector. Digital PCR analysis of gene insertion at both loci reveal that anti-CD20×CD3 pre-treated mice, but not mice that were administered anti-CD20 antibody or received no immunomodulation, show successful gene insertion at both loci equivalent to positive controls. Analysis of transgene expression by qPCR and protein expression of hFIX and hIgG1 in plasma by ELISA matches transduction and gene insertion findings. Longitudinal analysis of anti-AAV8 IgM and IgG antibody titers show that anti-CD20×CD3 pre-treated mice show no increase in antibody titers relative to baseline. By contrast, mice receiving AAV with anti-CD20 antibody, or receiving no immunomodulation, show robust anti-AAV8 IgM and IgG antibody responses. These data show that by preventing the anti-AAV IgM and IgG antibody response, anti-CD20×CD3 pre-treatment, but not pre-treatment with conventional anti-CD20 monoclonal antibodies, can enable AAV gene insertion of two distinct transgenes at two distinct loci.

The application's sequence listing, which the Patent Office published only in electronic form, follows.

SEQUENCE LISTING (902 sequences)

SEQ ID NO: 1 - DNA, 375 bp, synthetic construct
  source 1..375: mol_type = other DNA
gaggtgcagctggtggagtctgggggaggcttggtccagcctggggggtccctgagactctcctgtgcagcctctggattcacctttagtaacttttggatgacctgggtccgccaggctccagggaaggggctggagtgggtggccaacatgaaccaagatggaagtgagaaatactatgtggactctgtgaagggccgattcaccatctccagagacaacgccaagagctcactgtatctgcaaatgaacagcctgagagccgaggacacggctgtgtattactgtgcgagagatcgggaatattgtattagtaccagctgctatgatgactttgactactggggccagggaaccctggtcaccgtctcctca

SEQ ID NO: 2 - protein, 125 aa, synthetic construct
EVQLVESGGGLVQPGGSLRLSCAASGFTFSNFWMTWVRQAPGKGLEWVANMNQDGSEKYYVDSVKGRFTISRDNAKSSLYLQMNSLRAEDTAVYYCARDREYCISTSCYDDFDYWGQGTLVTVSS

SEQ ID NO: 3 - DNA, 24 bp, synthetic construct
  source 1..24: mol_type = other DNA
ggattcacctttagtaacttttgg

SEQ ID NO: 4 - protein, 8 aa, synthetic construct
GFTFSNFW

SEQ ID NO: 5 - DNA, 24 bp, synthetic construct
  source 1..24: mol_type = other DNA
atgaaccaagatggaagtgagaaa

SEQ ID NO: 6 - protein, 8 aa, synthetic construct
MNQDGSEK

SEQ ID NO: 7 - DNA, 54 bp, synthetic construct
  source 1..54: mol_type = other DNA
gcgagagatcgggaatattgtattagtaccagctgctatgatgactttgactac

SEQ ID NO: 8 - protein, 18 aa, synthetic construct
ARDREYCISTSCYDDFDY

SEQ ID NO: 9 - DNA, 324 bp, synthetic construct
  source 1..324: mol_type = other DNA
gacatccagatgacccagtctccatcctccctgtctgcatctgtaggagacagagtcaccatcacttgccgggcaagtcagagcattagcagctatttaaattggtatcagcagaaaccagggaaagcccctaagctcctgatctatgctgcatccagtttgcatagtggggtcccatcaaggttcagtggcagtggatctgggacagatttcactctcaccatcagcagtctgcaacctgaagattttgcaacttactactgtcaacagagttacagtacccctccgatcaccttcggccaagggacacgactggagattaaa

SEQ ID NO: 10 - protein, 108 aa, synthetic construct
DIQMTQSPSSLSASVGDRVTITCRASQSISSYLNWYQQKPGKAPKLLIYAASSLHSGVPSRFSGSGSGTDFTLTISSLQPEDFATYYCQQSYSTPPITFGQGTRLEIK

SEQ ID NO: 11 - DNA, 18 bp, synthetic construct
  source 1..18: mol_type = other DNA
cagagcattagcagctat

SEQ ID NO: 12 - protein, 6 aa, synthetic construct
QSISSY

SEQ ID NO: 13-14 - skipped (2 entries)

SEQ ID NO: 15 - DNA, 30 bp, synthetic construct
  source 1..30: mol_type = other DNA
caacagagttacagtacccctccgatcacc

SEQ ID NO: 16 - protein, 10 aa, synthetic construct
QQSYSTPPIT

SEQ ID NO: 17 - DNA, 324 bp, synthetic construct
  source 1..324: mol_type = other DNA
gacatccagatgacccagtctccatcctccctgtctgcatctgtaggagacagagtcaccatcacttgccgggcaagtcagagcattagcagctatttaaattggtatcagcagaaaccagggaaagcccctaagctcctgatctatgctgcatccagtttgcaaagtggggtcccgtcaaggttcagtggcagtggatctgggacagatttcactctcaccatcagcagtctgcaacctgaagattttgcaacttactactgtcaacagagttacagtacccctccgatcaccttcggccaagggacacgactggagattaaa

SEQ ID NO: 18 - protein, 108 aa, synthetic construct
DIQMTQSPSSLSASVGDRVTITCRASQSISSYLNWYQQKPGKAPKLLIYAASSLQSGVPSRFSGSGSGTDFTLTISSLQPEDFATYYCQQSYSTPPITFGQGTRLEIK

SEQ ID NO: 19 - DNA, 18 bp, synthetic construct
  source 1..18: mol_type = other DNA
cagagcattagcagctat

SEQ ID NO: 20 - protein, 6 aa, synthetic construct
QSISSY

SEQ ID NO: 21-22 - skipped (2 entries)

SEQ ID NO: 23 - DNA, 30 bp, synthetic construct; identical to SEQ ID NO: 15
  source 1..30: mol_type = other DNA

SEQ ID NO: 24 - protein, 10 aa, synthetic construct
QQSYSTPPIT

SEQ ID NO: 25 - DNA, 372 bp, synthetic construct
  source 1..372: mol_type = other DNA
gaagtacagcttgtagaatccggcggaggactggtacaacctggaagaagtcttagactgagttgcgcagctagtgggtttacattcgacgattacagcatgcattgggtgaggcaagctcctggtaaaggattggaatgggttagcgggatatcatggaactcaggaagcaagggatacgccgacagcgtgaaaggccgatttacaatatctagggacaacgcaaaaaactctctctaccttcaaatgaactctcttagggcagaagacacagcattgtattattgcgcaaaatacggcagtggttatggcaagttttatcattatggactggacgtgtggggacaagggacaacagtgacagtgagtagc

SEQ ID NO: 26 - protein, 124 aa, synthetic construct
EVQLVESGGGLVQPGRSLRLSCAASGFTFDDYSMHWVRQAPGKGLEWVSGISWNSGSKGYADSVKGRFTISRDNAKNSLYLQMNSLRAEDTALYYCAKYGSGYGKFYHYGLDVWGQGTTVTVSS

SEQ ID NO: 27 - DNA, 24 bp, synthetic construct
  source 1..24: mol_type = other DNA
gggtttacattcgacgattacagc

SEQ ID NO: 28 - protein, 8 aa, synthetic construct
GFTFDDYS

SEQ ID NO: 29 - DNA, 24 bp, synthetic construct
  source 1..24: mol_type = other DNA
atatcatggaactcaggaagcaag

SEQ ID NO: 30 - protein, 8 aa, synthetic construct
ISWNSGSK

SEQ ID NO: 31 - DNA, 51 bp, synthetic construct
  source 1..51: mol_type = other DNA
gcaaaatacggcagtggttatggcaagttttatcattatggactggacgtg

SEQ ID NO: 32 - protein, 17 aa, synthetic construct
AKYGSGYGKFYHYGLDV

SEQ ID NO: 33 - DNA, 372 bp, synthetic construct
  source 1..372: mol_type = other DNA
gaagtacagcttgtagaatccggcggaggactggtacaacctggaagaagtcttagactgagttgcgcagctagtgggtttacattcgacgattacagcatgcattgggtgaggcaagctcctggtaaaggattggaatgggttagcgggatatcatggaactcaggaagcatcggatacgccgacagcgtgaaaggccgatttacaatatctagggacaacgcaaaaaactctctctaccttcaaatgaactctcttagggcagaagacacagcattgtattattgcgcaaaatacggcagtggttatggcaagttttattattatggaatggacgtgtggggacaagggacaacagtgacagtgagtagc

SEQ ID NO: 34 - protein, 124 aa, synthetic construct
EVQLVESGGGLVQPGRSLRLSCAASGFTFDDYSMHWVRQAPGKGLEWVSGISWNSGSIGYADSVKGRFTISRDNAKNSLYLQMNSLRAEDTALYYCAKYGSGYGKFYYYGMDVWGQGTTVTVSS

SEQ ID NO: 35 - DNA, 24 bp, synthetic construct
  source 1..24: mol_type = other DNA
gggtttacattcgacgattacagc

SEQ ID NO: 36 - protein, 8 aa, synthetic construct
GFTFDDYS

SEQ ID NO: 37 - DNA, 24 bp, synthetic construct
  source 1..24: mol_type = other DNA
atatcatggaactcaggaagcatc

SEQ ID NO: 38 - protein, 8 aa, synthetic construct
ISWNSGSI

SEQ ID NO: 39 - DNA, 51 bp, synthetic construct
  source 1..51: mol_type = other DNA
gcaaaatacggcagtggttatggcaagttttattattatggaatggacgtg

SEQ ID NO: 40 - protein, 17 aa, synthetic construct
AKYGSGYGKFYYYGMDV

SEQ ID NO: 41 - protein, 451 aa, synthetic construct
EVQLVESGGGLVQPGGSLRLSCAASGFTFSNFWMTWVRQAPGKGLEWVANMNQDGSEKYYVDSVKGRFTISRDNAKSSLYLQMNSLRAEDTAVYYCARDREYCISTSCYDDFDYWGQGTLVTVSSASTKGPSVFPLAPCSRSTSESTAALGCLVKDYFPEPVTVSWNSGALTSGVHTFPAVLQSSGLYSLSSVVTVPSSSLGTKTYTCNVDHKPSNTKVDKRVESKYGPPCPPCPAPPVAGPSVFLFPPKPKDTLMISRTPEVTCVVVDVSQEDPEVQFNWYVDGVEVHNAKTKPREEQFNSTYRVVSVLTVLHQDWLNGKEYKCKVSNKGLPSSIEKTISKAKGQPREPQVYTLPPSQEEMTKNQVSLTCLVKGFYPSDIAVEWESNGQPENNYKTTPPVLDSDGSFFLYSRLTVDKSRWQEGNVFSCSVMHEALHNHYTQKSLSLSLGK

SEQ ID NO: 42 - protein, 450 aa, synthetic construct
EVQLVESGGGLVQPGRSLRLSCAASGFTFDDYSMHWVRQAPGKGLEWVSGISWNSGSKGYADSVKGRFTISRDNAKNSLYLQMNSLRAEDTALYYCAKYGSGYGKFYHYGLDVWGQGTTVTVSSASTKGPSVFPLAPCSRSTSESTAALGCLVKDYFPEPVTVSWNSGALTSGVHTFPAVLQSSGLYSLSSVVTVPSSSLGTKTYTCNVDHKPSNTKVDKRVESKYGPPCPPCPAPPVAGPSVFLFPPKPKDTLMISRTPEVTCVVVDVSQEDPEVQFNWYVDGVEVHNAKTKPREEQFNSTYRVVSVLTVLHQDWLNGKEYKCKVSNKGLPSSIEKTISKAKGQPREPQVYTLPPSQEEMTKNQVSLTCLVKGFYPSDIAVEWESNGQPENNYKTTPPVLDSDGSFFLYSRLTVDKSRWQEGNVFSCSVMHEALHNRFTQKSLSLSPGK

SEQ ID NO: 43 - protein, 215 aa, synthetic construct
DIQMTQSPSSLSASVGDRVTITCRASQSISSYLNWYQQKPGKAPKLLIYAASSLQSGVPSRFSGSGSGTDFTLTISSLQPEDFATYYCQQSYSTPPITFGQGTRLEIKRTVAAPSVFIFPPSDEQLKSGTASVVCLLNNFYPREAKVQWKVDNALQSGNSQESVTEQDSKDSTYSLSSTLTLSKADYEKHKVYACEVTHQGLSSPVTKSFNRGEC

SEQ ID NO: 44 - protein, 127 aa, synthetic construct
EVQLVESGGGLVQPGRSLRLSCVASGFTFNDYAMHWVRQAPGKGLEWVSVISWNSDSIGYADSVKGRFTISRDNAKNSLYLQMHSLRAEDTALYYCAKDNHYGSGSYYYYQYGMDVWGQGTTVTVSS

SEQ ID NO: 45 - protein, 108 aa, synthetic construct
EIVMTQSPATLSVSPGERATLSCRASQSVSSNLAWYQQKPGQAPRLLIYGASTRATGIPARFSGSGSGTEFTLTISSLQSEDFAVYYCQHYINWPLTFGGGTKVEIKR

SEQ ID NO: 46 - protein, 123 aa, synthetic construct
EVQLVESGGGLVQPGRSLRLSCAASGFTFDDYTMHWVRQAPGKGLEWVSGISWNSGSIGYADSVKGRFTISRDNAKKSLYLQMNSLRAEDTALYYCAKDNSGYGHYYYGMDVWGQGTTVTVAS

SEQ ID NO: 47 - protein, 8 aa, synthetic construct
GFTFNDYA

SEQ ID NO: 48 - protein, 8 aa, synthetic construct
ISWNSDSI

SEQ ID NO: 49 - protein, 20 aa, synthetic construct
AKDNHYGSGSYYYYQYGMDV

SEQ ID NO: 50 - protein, 6 aa, synthetic construct
QSVSSN

SEQ ID NO: 51 - skipped

SEQ ID NO: 52 - protein, 9 aa, synthetic construct
QHYINWPLT

SEQ ID NO: 53 - protein, 8 aa, synthetic construct
GFTFDDYT

SEQ ID NO: 54 - protein, 8 aa, synthetic construct
ISWNSGSI

SEQ ID NO: 55 - protein, 16 aa, synthetic construct
AKDNSGYGHYYYGMDV

SEQ ID NO: 56 - skipped

SEQ ID NO: 57 - protein, 461 aa, Homo sapiens
  REGION 1..28: note = MISC_FEATURE - Signal peptide
  REGION 29..46: note = MISC_FEATURE - Propeptide
  REGION 47..461: note = MISC_FEATURE - Mature FIX
MQRVNMIMAESPGLITICLLGYLLSAECTVFLDHENANKILNRPKRYNSGKLEEFVQGNLERECMEEKCSFEEAREVFENTERTTEFWKQYVDGDQCESNPCLNGGSCKDDINSYECWCPFGFEGKNCELDVTCNIKNGRCEQFCKNSADNKVVCSCTEGYRLAENQKSCEPAVPFPCGRVSVSQTSKLTRAETVFPDVDYVNSTEAETILDNITQSTQSFNDFTRVVGGEDAKPGQFPWQVVLNGKVDAFCGGSIVNEKWIVTAAHCVETGVKITVVAGEHNIEETEHTEQKRNVIRIIPHHNYNAAINKYNHDIALLELDEPLVLNSYVTPICIADKEYTNIFLKFGSGYVSGWGRVFHKGRSALVLQYLRVPLVDRATCLRSTKFTIYNNMFCAGFHEGGRDSCQGDSGGPHVTEVEGTSFLTGIISWGEECAMKGKYGIYTKVSRYVNWIKEKTKLT

SEQ ID NO: 58 - DNA, 2800 bp, Homo sapiens
  source 1..2800: mol_type = other DNA
actttcacaatctgctagcaaaggttatgcagcgcgtgaacatgatcatggcagaatcaccaggcctcatcaccatctgccttttaggatatctactcagtgctgaatgtacagtttttcttgatcatgaaaacgccaacaaaattctgaatcggccaaagaggtataattcaggtaaattggaagagtttgttcaagggaaccttgagagagaatgtatggaagaaaagtgtagttttgaagaagcacgagaagtttttgaaaacactgaaagaacaactgaattttggaagcagtatgttgatggagatcagtgtgagtccaatccatgtttaaatggcggcagttgcaaggatgacattaattcctatgaatgttggtgtccctttggatttgaaggaaagaactgtgaattagatgtaacatgtaacattaagaatggcagatgcgagcagttttgtaaaaatagtgctgataacaaggtggtttgctcctgtactgagggatatcgacttgcagaaaaccagaagtcctgtgaaccagcagtgccatttccatgtggaagagtttctgtttcacaaacttctaagctcacccgtgctgagactgtttttcctgatgtggactatgtaaattctactgaagctgaaaccattttggataacatcactcaaagcacccaatcatttaatgacttcactcgggttgttggtggagaagatgccaaaccaggtcaattcccttggcaggttgttttgaatggtaaagttgatgcattctgtggaggctctatcgttaatgaaaaatggattgtaactgctgcccactgtgttgaaactggtgttaaaattacagttgtcgcaggtgaacataatattgaggagacagaacatacagagcaaaagcgaaatgtgattcgaattattcctcaccacaactacaatgcagctattaataagtacaaccatgacattgcccttctggaactggacgaacccttagtgctaaacagctacgttacacctatttgcattgctgacaaggaatacacgaacatcttcctcaaatttggatctggctatgtaagtggctggggaagagtcttccacaaagggagatcagctttagttcttcagtaccttagagttccacttgttgaccgagccacatgtcttcgatctacaaagttcaccatctataacaacatgttctgtgctggcttccatgaaggaggtagagattcatgtcaaggagatagtgggggaccccatgttactgaagtggaagggaccagtttcttaactggaattattagctggggtgaagagtgtgcaatgaaaggcaaatatggaatatataccaaggtatcccggtatgtcaactggattaaggaaaaaacaaagctcacttaatgaaagatggatttccaaggttaattcattggaattgaaaattaacagggcctctcactaactaatcactttcccatcttttgttagatttgaatatatacattctatgatcattgctttttctctttacaggggagaatttcatattttacctgagcaaattgattagaaaatggaaccactagaggaatataatgtgttaggaaattacagtcatttctaagggcccagcccttgacaaaattgtgaagttaaattctccactctgtccatcagatactatggttctccactatggcaactaactcactcaattttccctccttagcagcattccatcttcccgatcttctttgcttctccaaccaaaacatcaatgtttattagttctgtatacagtacaggatctttggtctactctatcacaaggccagtaccacactcatgaagaaagaacacaggagtagctgagaggctaaaactcatcaaaaacactactccttttcctctaccctattcctcaatcttttaccttttccaaatcccaatccccaaatcagtttttctctttcttactccctctctcccttttaccctccatggtcgttaaaggagagatggggagcatcattctgttatacttctgtacacagttatacatgtctatcaaacccagacttgcttccgtagtggagacttgcttttcagaacatagggatgaagtaaggtgcctgaaaagtttgggggaaaagtttctttcagagagttaagttattttatatatataatatatatataaaatatataatatacaatataaatatatagtgtgtgtgtatgcgtgtgtgtagacacacacgcatacacacatataatggaagcaataagccattctaagagcttgtatggttatggaggtctgactaggcatgatttcacgaaggcaagattggcatatcattgtaactaaaaaagctgacattgacccagacatattgtactctttctaaaaataataataataatgctaacagaaagaagagaaccgttcgtttgcaatctacagctagtagagactttgaggaagaattcaacagtgtgtcttcagcagtgttcagagccaagcaagaagttgaagttgcctagaccagaggacataagtatcatgtctcctttaactagcataccccgaagtggagaagggtgcagcaggctcaaaggcataagtcattccaatcagccaactaagttgtccttttctggtttcgtgttcaccatggaacattttgattatagttaatccttctatcttgaatcttctagagagttgctgaccaactgacgtatgtttccctttgtgaattaataaactggtgttctggttcata

SEQ ID NO: 59 - DNA, 1386 bp, Homo sapiens
  source 1..1386: mol_type = other DNA
atgcagcgcgtgaacatgatcatggcagaatcaccaggcctcatcaccatctgccttttaggatatctactcagtgctgaatgtacagtttttcttgatcatgaaaacgccaacaaaattctgaatcggccaaagaggtataattcaggtaaattggaagagtttgttcaagggaaccttgagagagaatgtatggaagaaaagtgtagttttgaagaagcacgagaagtttttgaaaacactgaaagaacaactgaattttggaagcagtatgttgatggagatcagtgtgagtccaatccatgtttaaatggcggcagttgcaaggatgacattaattcctatgaatgttggtgtccctttggatttgaaggaaagaactgtgaattagatgtaacatgtaacattaagaatggcagatgcgagcagttttgtaaaaatagtgctgataacaaggtggtttgctcctgtactgagggatatcgacttgcagaaaaccagaagtcctgtgaaccagcagtgccatttccatgtggaagagtttctgtttcacaaacttctaagctcacccgtgctgagactgtttttcctgatgtggactatgtaaattctactgaagctgaaaccattttggataacatcactcaaagcacccaatcatttaatgacttcactcgggttgttggtggagaagatgccaaaccaggtcaattcccttggcaggttgttttgaatggtaaagttgatgcattctgtggaggctctatcgttaatgaaaaatggattgtaactgctgcccactgtgttgaaactggtgttaaaattacagttgtcgcaggtgaacataatattgaggagacagaacatacagagcaaaagcgaaatgtgattcgaattattcctcaccacaactacaatgcagctattaataagtacaaccatgacattgcccttctggaactggacgaacccttagtgctaaacagctacgttacacctatttgcattgctgacaaggaatacacgaacatcttcctcaaatttggatctggctatgtaagtggctggggaagagtcttccacaaagggagatcagctttagttcttcagtaccttagagttccacttgttgaccgagccacatgtcttcgatctacaaagttcaccatctataacaacatgttctgtgctggcttccatgaaggaggtagagattcatgtcaaggagatagtgggggaccccatgttactgaagtggaagggaccagtttcttaactggaattattagctggggtgaagagtgtgcaatgaaaggcaaatatggaatatataccaaggtatcccggtatgtcaactggattaaggaaaaaacaaagctcacttaa

SEQ ID NO: 60 - DNA, 1296 bp, synthetic construct
  misc_feature 1..1296: note = Synthetic
  source 1..1296: mol_type = other DNA
tttcttgatcatgaaaacgccaacaaaattctgaatcggccaaagaggtataattcaggtaaattggaagagtttgttcaagggaaccttgagagagaatgtatggaagaaaagtgtagttttgaagaagcacgagaagtttttgaaaacactgaaagaacaactgaattttggaagcagtatgttgatggagatcagtgtgagtccaatccatgtttaaatggcggcagttgcaaggatgacattaattcctatgaatgttggtgtccctttggatttgaaggaaagaactgtgaattagatgtaacatgtaacattaagaatggcagatgcgagcagttttgtaaaaatagtgctgataacaaggtggtttgctcctgtactgagggatatcgacttgcagaaaaccagaagtcctgtgaaccagcagtgccatttccatgtggaagagtttctgtttcacaaacttctaagctcacccgtgctgagactgtttttcctgatgtggactatgtaaattctactgaagctgaaaccattttggataacatcactcaaagcacccaatcatttaatgacttcactcgggttgttggtggagaagatgccaaaccaggtcaattcccttggcaggttgttttgaatggtaaagttgatgcattctgtggaggctctatcgttaatgaaaaatggattgtaactgctgcccactgtgttgaaactggtgttaaaattacagttgtcgcaggtgaacataatattgaggagacagaacatacagagcaaaagcgaaatgtgattcgaattattcctcaccacaactacaatgcagctattaataagtacaaccatgacattgcccttctggaactggacgaacccttagtgctaaacagctacgttacacctatttgcattgctgacaaggaatacacgaacatcttcctcaaatttggatctggctatgtaagtggctggggaagagtcttccacaaagggagatcagctttagttcttcagtaccttagagttccacttgttgaccgagccacatgtcttcgatctacaaagttcaccatctataacaacatgttctgtgctggcttccatgaaggaggtagagattcatgtcaaggagatagtgggggaccccatgttactgaagtggaagggaccagtttcttaactggaattattagctggggtgaagagtgtgcaatgaaaggcaaatatggaatatataccaaggtatcccggtatgtcaactggattaaggaaaaaacaaagctcacttaa

SEQ ID NO: 61 - DNA, 1296 bp, synthetic construct
  misc_feature 1..1296: note = Synthetic
  misc_feature 60: note = Cryptic Splice Donor Site Mutated
  misc_feature 201: note = Cryptic Splice Donor Site Mutated
  misc_feature 618: note = Cryptic Splice Donor Site Mutated
  source 1..1296: mol_type = other DNA
tttcttgatcatgaaaatgccaacaaaattctgaataggccaaagaggtataattcagggaaattggaagagtttgttcaagggaaccttgagagagaatgtatggaagaaaagtgtagttttgaagaagcaagagaagtttttgaaaacactgaaagaacaactgaattttggaagcagtatgttgatggagatcagtgcgagtccaatccatgtttaaatgggggcagttgcaaggatgacattaattcctatgaatgttggtgtccctttggatttgaaggaaagaactgtgaattagatgtaacatgtaacattaagaatggcagatgtgagcagttttgtaaaaatagtgctgataacaaggtggtttgctcctgtactgagggatatagacttgcagaaaaccagaagtcctgtgaaccagcagtgccatttccatgtggaagagtttctgtttcacaaacttctaagctcaccagagctgagactgtttttcctgatgtggactatgtaaattctactgaagctgaaaccattttggataacatcactcaaagcacccaatcatttaatgacttcactagggttgttggtggagaagatgccaaaccaggacaattcccttggcaggttgttttgaatggtaaagttgatgcattctgtggaggctctattgttaatgaaaaatggattgtaactgctgcccactgtgttgaaactggtgttaaaattacagttgtggcaggtgaacataatattgaggagacagaacatacagagcaaaagagaaatgtgattagaattattcctcaccacaactacaatgcagctattaataagtacaaccatgacattgcccttctggaactggatgaacccttagtgctaaacagctatgttacacctatttgcattgctgacaaggaatacaccaacatcttcctcaaatttggatctggctatgtaagtggctggggaagagtcttccacaaagggagatcagctttagttcttcagtaccttagagttccacttgttgacagagccacatgtcttaggtctacaaagttcaccatctataacaacatgttctgtgctggcttccatgaaggaggtagagattcatgtcaaggagatagtgggggaccccatgttactgaagtggaagggaccagtttcttaactggaattattagctggggtgaagagtgtgcaatgaaaggcaaatatggaatatataccaaggtatccaggtatgtcaactggattaaggaaaaaacaaagctcacttaa

SEQ ID NO: 62 - DNA, 1296 bp, synthetic construct
  misc_feature 1..1296: note = Synthetic
  source 1..1296: mol_type = other DNA
tttcttgatcatgaaaatgccaacaaaattctgaataggccaaagaggtataattcaggtaaattggaagagtttgttcaagggaaccttgagagagaatgtatggaagaaaagtgtagttttgaagaagcaagagaagtttttgaaaacactgaaagaacaactgaattttggaagcagtatgttgatggagatcagtgtgagtccaatccatgtttaaatgggggcagttgcaaggatgacattaattcctatgaatgttggtgtccctttggatttgaaggaaagaactgtgaattagatgtaacatgtaacattaagaatggcagatgtgagcagttttgtaaaaatagtgctgataacaaggtggtttgctcctgtactgagggatatagacttgcagaaaaccagaagtcctgtgaaccagcagtgccatttccatgtggaagagtttctgtttcacaaacttctaagctcaccagagctgagactgtttttcctgatgtggactatgtaaattctactgaagctgaaaccattttggataacatcactcaaagcacccaatcatttaatgacttcactagggttgttggtggagaagatgccaaaccaggtcaattcccttggcaggttgttttgaatggtaaagttgatgcattctgtggaggctctattgttaatgaaaaatggattgtaactgctgcccactgtgttgaaactggtgttaaaattacagttgtggcaggtgaacataatattgaggagacagaacatacagagcaaaagagaaatgtgattagaattattcctcaccacaactacaatgcagctattaataagtacaaccatgacattgcccttctggaactggatgaacccttagtgctaaacagctatgttacacctatttgcattgctgacaaggaatacaccaacatcttcctcaaatttggatctggctatgtaagtggctggggaagagtcttccacaaagggagatcagctttagttcttcagtaccttagagttccacttgttgacagagccacatgtcttaggtctacaaagttcaccatctataacaacatgttctgtgctggcttccatgaaggaggtagagattcatgtcaaggagatagtgggggaccccatgttactgaagtggaagggaccagtttcttaactggaattattagctggggtgaagagtgtgcaatgaaaggcaaatatggaatatataccaaggtatccaggtatgtcaactggattaaggaaaaaacaaagctcacttaa

SEQ ID NO: 63 - DNA, 1296 bp, synthetic construct
  misc_feature 1..1296: note = Synthetic
  source 1..1296: mol_type = other DNA
tttcttgatcatgaaaacgccaacaaaattctgaatcggccaaagaggtataattcagggaaattggaagagtttgttcaagggaaccttgagagagaatgtatggaagaaaagtgtagttttgaagaagcacgagaagtttttgaaaacactgaaagaacaactgaattttggaagcagtatgttgatggagatcagtgcgagtccaatccatgtttaaatggcggcagttgcaaggatgacattaattcctatgaatgttggtgtccctttggatttgaaggaaagaactgtgaattagatgtaacatgtaacattaagaatggcagatgcgagcagttttgtaaaaatagtgctgataacaaggtggtttgctcctgtactgagggatatcgacttgcagaaaaccagaagtcctgtgaaccagcagtgccatttccatgtggaagagtttctgtttcacaaacttctaagctcacccgtgctgagactgtttttcctgatgtggactatgtaaattctactgaagctgaaaccattttggataacatcactcaaagcacccaatcatttaatgacttcactcgggttgttggtggagaagatgccaaaccaggacaattcccttggcaggttgttttgaatggtaaagttgatgcattctgtggaggctctatcgttaatgaaaaatggattgtaactgctgcccactgtgttgaaactggtgttaaaattacagttgtcgcaggtgaacataatattgaggagacagaacatacagagcaaaagcgaaatgtgattcgaattattcctcaccacaactacaatgcagctattaataagtacaaccatgacattgcccttctggaactggacgaacccttagtgctaaacagctacgttacacctatttgcattgctgacaaggaatacacgaacatcttcctcaaatttggatctggctatgtaagtggctggggaagagtcttccacaaagggagatcagctttagttcttcagtaccttagagttccacttgttgaccgagccacatgtcttcgatctacaaagttcaccatctataacaacatgttctgtgctggcttccatgaaggaggtagagattcatgtcaaggagatagtgggggaccccatgttactgaagtggaagggaccagtttcttaactggaattattagctggggtgaagagtgtgcaatgaaaggcaaatatggaatatataccaaggtatcccggtatgtcaactggattaaggaaaaaacaaagctcacttaa

SEQ ID NO: 64 - DNA, 1296 bp, synthetic construct
  misc_feature 1..1296: note = Synthetic
  source 1..1296: mol_type = other DNA
tttctggaccacgaaaacgcgaataagatacttaaccggcctaaaaggtataactcaggaaagcttgaagaattcgtgcaagggaacttggagcgagagtgtatggaggaaaaatgcagttttgaagaagcgcgcgaggtgtttgagaatacagaacggaccactgagttctggaagcaatatgtcgatggggaccaatgcgaatctaatccatgtctgaatggggggagttgtaaagacgatataaattcctacgagtgttggtgcccttttggttttgaaggaaaaaactgcgagttggacgtcacctgcaacattaaaaatggacgatgcgagcaattctgtaaaaattccgccgacaacaaagttgtgtgtagttgcactgagggctaccggctcgctgagaatcaaaagagctgtgaaccggcggtgcccttcccgtgcggtcgggtaagtgtgtcccagacatcaaagttgacaagggccgagacagtttttcccgatgtggactacgttaactctactgaagccgaaacgattcttgataatataacacaatccacacagtcatttaatgactttactagggttgtcgggggcgaggacgctaaacctggccaatttccatggcaggtggtgctcaacggaaaagtcgacgcgttttgtgggggctccatagtcaatgaaaagtggattgtaacggccgcacactgtgtcgagacgggggttaagattacggtcgtggctggcgaacacaacattgaagaaactgagcatactgaacagaaaaggaatgttatcaggatcataccccatcacaattataatgccgctataaacaagtacaaccatgatatagccctcctggagctggacgagccactcgtacttaactcctatgttaccccgatttgtatagccgataaagaatatacaaatatcttcttgaaatttgggagcggatatgtgagtgggtgggggcgggtcttccacaaaggtcgatcagccctcgttctgcaatatttgcgcgtcccgttggtcgatagagcgacctgtcttcggtccacgaaatttacgatttacaataacatgttttgtgctgggtttcacgagggcggtcgcgactcatgccaaggtgattcaggtggaccacacgtcactgaagtcgaaggaacaagtttcttgaccgggataataagttggggggaggaatgtgcgatgaaggggaaatatggcatctatacgaaggtctctcgctacgtgaattggataaaagaaaagactaagctcacctaa

SEQ ID NO: 65 - DNA, 1296 bp, synthetic construct
  misc_feature 1..1296: note = Synthetic
  source 1..1296: mol_type = other DNA
tttcttgatcatgaaaatgccaacaaaattctgaatagaccaaagaggtataactctggcaagcttgaagagtttgtacaggggaatctggagagagagtgtatggaagagaagtgcagctttgaggaagccagagaagtgtttgaaaatacagagagaacaactgaattttggaagcagtatgtggatggtgatcaatgtgagagcaatccctgcttgaatggggggagctgtaaagatgatatcaacagctatgaatgttggtgtccctttggatttgaggggaaaaactgtgagcttgatgtgacctgtaatatcaagaatggcaggtgtgagcaattttgcaagaattctgctgataacaaagtggtctgtagctgcactgagggatataggctggctgaaaaccagaagagctgtgaacctgcagtgccttttccctgtgggagagtgtctgtgagccaaaccagcaagctgactagggctgaaacagtctttcctgatgtagattatgtgaatagcactgaggctgagacaatccttgacaatatcactcagagcacacagagcttcaatgacttcaccagggtggtaggaggggaggatgccaagcctgggcagttcccctggcaggtagtgctcaatggaaaagtggatgccttttgtggaggttcaattgtaaatgagaagtggattgtgactgcagcccactgtgtggaaactggagtcaagattactgtggtggctggagagcacaatattgaggaaactgagcacactgagcagaagaggaatgtgatcaggattatcccccaccacaactacaatgctgctatcaacaagtacaaccatgacattgccctcctggaactggatgaacccctggtcttgaacagctatgtgacacccatctgtattgctgataaagagtacaccaacatcttcttgaaatttgggtctggatatgtgtctggctggggcagggtgttccataaaggcaggtctgccctggtattgcagtatttgagggtgcctctggtggatagagcaacctgcttgaggagcaccaagtttacaatctacaacaatatgttctgtgcagggttccatgaaggtggtagagacagctgccagggagattctgggggtccccatgtgactgaggtggagggaaccagcttcctgactgggattatcagctggggtgaggagtgtgctatgaagggaaagtatgggatctacacaaaagtatccagatatgtgaactggattaaggagaaaaccaagctgacttga

SEQ ID NO: 66 - DNA, 1296 bp, synthetic construct
  misc_feature 1..1296: note = Synthetic
  source 1..1296: mol_type = other DNA
ttcctggaccatgagaatgccaacaagatcctgaacaggcccaagaggtacaactctggcaagctggaggagtttgtgcagggcaacctggagagagagtgcatggaggagaagtgcagctttgaggaggccagggaggtgtttgagaacacagagagaaccacagagttctggaagcagtatgtggatggagaccagtgtgagagcaacccctgcctgaatggaggcagctgcaaggatgacatcaacagctatgagtgctggtgcccctttggctttgagggcaagaactgtgagctggatgtgacctgcaacatcaagaatggcagatgtgagcagttctgcaagaactctgctgacaacaaggtggtgtgcagctgcacagagggctacaggctggctgagaaccagaagagctgtgagcctgctgtgcccttcccctgtggcagagtgtctgtgagccagaccagcaagctgaccagggctgagacagtgttccctgatgtggactatgtgaacagcacagaggctgagaccatcctggacaacatcacccagagcacccagagcttcaatgacttcaccagggtggtggggggagaggatgccaagcctggccagttcccctggcaggtggtgctgaatggcaaggtggatgccttctgtggaggcagcattgtgaatgagaagtggattgtgacagctgcccactgtgtggagacaggggtgaagatcacagtggtggctggggagcacaacattgaggagacagagcacacagagcagaagaggaatgtgatcaggatcatcccccaccacaactacaatgctgccatcaacaagtacaaccatgacattgccctgctggagctggatgagcccctggtgctgaacagctatgtgacccccatctgcattgctgacaaggagtacaccaacatcttcctgaagtttggctctggctatgtgtctggctggggcagagtgttccacaagggcaggtctgccctggtgctgcagtacctgagagtgcccctggtggacagggccacctgcctgaggagcaccaagttcaccatctacaacaacatgttctgtgctggcttccatgagggaggcagagacagctgccagggagactctgggggcccccatgtgacagaggtggagggcaccagcttcctgacaggcatcatcagctggggggaggagtgtgccatgaagggcaagtatggcatctacaccaaggtgagcaggtatgtgaactggatcaaggagaagaccaagctgacctga

SEQ ID NO: 67 - DNA, 1296 bp, synthetic construct
  misc_feature 1..1296: note = Synthetic
  source 1..1296: mol_type = other DNA
ttcctggaccatgagaatgccaacaagatcctgaacaggcccaagaggtacaactctggcaagctggaagagtttgtgcagggcaacctggaaagggaatgcatggaagagaagtgcagctttgaagaggccagggaagtgtttgagaacacagagagaaccacagagttctggaagcagtatgtggatggggaccagtgtgaaagcaacccctgcctgaatggtggcagctgcaaggatgacatcaacagctatgagtgctggtgcccctttggctttgagggcaagaactgtgaactggatgtgacctgcaacatcaagaatggcagatgtgaacagttctgcaagaactctgctgacaacaaggttgtgtgctcctgcacagagggctacagactggctgagaaccagaaaagctgtgaacctgctgtgccctttccatgtggcagagtgtctgtgtcccagaccagcaagctgaccagagctgagacagtgttccctgatgtggactatgtgaactccacagaggctgaaaccatcctggacaacatcacccagagcacccagtccttcaatgacttcacaagagttgttggaggggaagatgccaagcctggacagttcccttggcaagtggtgctgaatggcaaagtggatgccttctgtggtggctccattgtgaatgagaagtggattgtgacagctgcccactgtgtggaaacaggggtcaagatcacagtggtggctggggagcacaacattgaggaaacagagcacacagagcaaaagaggaatgtcatcaggatcatccctcaccacaactacaatgctgccatcaacaagtacaaccatgacattgccctgcttgagctggatgagcccctggtcctgaactcctatgtgacccctatctgcattgctgacaaagagtacaccaacatctttctgaagtttggctctggctatgtgtctggctggggtagagtgttccacaagggaaggtctgccctggtgctgcagtacctgagagtgcccctggtggatagagccacctgtctgagaagcaccaagttcaccatctacaacaacatgttctgtgctgggttccatgaaggtggcagagactcctgccagggagatagtggtggccctcatgtgacagaggtggaaggcaccagctttctgacaggcatcatcagctggggagaagagtgtgccatgaagggcaaatatggcatctacaccaaggtgtccagatatgtcaactggatcaaagaaaagaccaagctcacctga

SEQ ID NO: 68 - DNA, 1296 bp, synthetic construct
  misc_feature 1..1296: note = Synthetic
  source 1..1296: mol_type = other DNA
ttcctggaccatgagaatgccaacaagatcctcaacagacccaagagatacaacagtggcaagctggaggagtttgtgcagggcaacctggagagggagtgcatggaagagaagtgcagctttgaggaagccagagaagtgtttgaaaacacagagagaaccactgagttctggaagcagtatgttgatggagaccagtgtgagagcaacccttgcctgaatggaggcagctgcaaagatgacatcaacagctatgagtgctggtgcccttttggctttgagggcaagaactgtgagctggatgtcacctgcaacatcaagaatggcagatgtgaacagttctgcaagaactcagcagacaacaaggtggtgtgcagctgcacagagggctacaggctggctgaaaaccagaagagctgtgaacctgctgtccctttcccctgtggcagagtgtctgtgtcccagacctccaagctgaccagggctgaaacagtgttccctgatgtggactatgtgaacagcactgaggctgagaccatcctggacaacatcacccagagcacccagagcttcaatgacttcaccagagtggtgggaggagaggatgccaagcctggccagttcccatggcaggtggtgctgaatggcaaggtggatgccttctgtgggggcagcattgtgaatgaaaaatggattgtgacagctgcccactgtgtggaaacaggtgtcaagatcacagtggtggctggtgaacacaacatagaagaaacagagcacacagagcagaagagaaatgtgatcaggatcatccctcaccacaactacaatgcagccatcaacaagtacaaccatgacattgccctgctggaacttgatgagcctctggtgctgaacagctatgttacccccatctgcattgcagacaaagagtacaccaacatcttcctgaagtttggctctggctatgtgtctggctggggcagagtgttccacaagggcaggtctgccctggtgctgcaatacctgagagtccccctggtggacagagccacctgcctgagaagcaccaagttcaccatctacaacaacatgttctgtgctggcttccatgagggaggcagagacagctgccaaggagactctggaggcccacatgtgacagaggtggagggcaccagcttcctgacaggcatcatcagctggggagaggaatgtgccatgaagggcaagtatggcatctacaccaaggtgtccagatatgtgaactggatcaaagaaaaaaccaaactgacctga

SEQ ID NO: 69 - DNA, 1296 bp, synthetic construct
  misc_feature 1..1296: note = Synthetic
  source 1..1296: mol_type = other DNA
ttcctggaccatgagaatgccaacaagatcctcaacagacccaagagatacaacagtggcaagctggaggagtttgtgcagggcaacctggagagggagtgcatggaagagaagtgcagctttgaggaagccagagaagtgtttgaaaacacagagagaaccactgagttctggaagcagtacgttgatggagaccagtgtgagagcaacccttgcctgaatggaggcagctgcaaagatgacatcaacagctatgagtgctggtgcccttttggctttgagggcaagaactgtgagctggatgtcacctgcaacatcaagaatggcagatgtgaacagttctgcaagaactcagcagacaacaaggtggtgtgcagctgcacagagggctacaggctggctgaaaaccagaagagctgtgaacctgctgtccctttcccctgtggcagagtgtctgtgtcccagacctccaagctgaccagggctgaaacagtgttccctgatgtggactatgtgaacagcactgaggctgagaccatcctggacaacatcacccagagcacccagagcttcaatgacttcaccagagtggtgggaggagaggatgccaagcctggccagttcccatggcaggtggtgctgaatggcaaggtggatgccttctgtgggggcagcattgtgaatgaaaaatggattgtgacagctgcccactgtgtggaaacaggtgtcaagatcacagtggtggctggtgaacacaacatagaagaaacagagcacacagagcagaagagaaatgtgatcaggatcatccctcaccacaactacaatgcagccatcaacaagtacaaccatgacattgccctgctggaacttgatgagcctctggtgctgaacagctatgttacccccatctgcattgcagacaaagagtacaccaacatcttcctgaagtttggctctggctacgtgtctggctggggcagagtgttccacaagggcaggtctgccctggtgctgcaatacctgagagtccccctggtggacagagccacctgcctgagaagcaccaagttcaccatctacaacaacatgttctgtgctggcttccatgagggaggcagagacagctgccaaggagactctggaggcccacacgtgacagaggtggagggcaccagcttcctgacaggcatcatcagctggggagaggaatgtgccatgaagggcaagtatggcatctacaccaaggtgtccagatatgtgaactggatcaaagaaaaaaccaaactgacctga

SEQ ID NO: 70 - DNA, 1296 bp, synthetic construct
  misc_feature 1..1296: note = Synthetic
  source 1..1296: mol_type = other DNA
ttcctggaccatgagaatgccaacaagatcctgaacagacccaagagatacaactctggcaagctggaggagtttgtgcaaggcaacctggagagagagtgcatggaagaaaagtgcagctttgaagaagccagggaagtgtttgaaaacacagagagaaccactgagttctggaagcagtatgtggatggagaccagtgtgagagcaacccttgcctgaatggaggcagctgcaaggatgacatcaacagctatgaatgctggtgcccttttggctttgaaggcaaaaactgtgagctggatgtcacctgcaacatcaagaatggcagatgtgaacagttctgcaagaactctgctgacaacaaggtggtgtgcagctgcacagagggctacaggctggcagaaaaccagaagtcctgtgaacctgctgtccctttcccctgtggcagagtgtctgtgtcccagaccagcaagctgaccagggctgagactgtgttccctgatgtggactatgtgaacagcacagaggctgaaaccatcctggacaacatcacccagagcacccagtccttcaatgacttcaccagggtggtgggtggagaggatgccaagcctggccagttcccatggcaggtggtgctgaatggcaaagtggatgccttctgtggaggcagcattgtgaatgagaaatggattgtgacagctgcccactgtgtggagacaggtgtcaaaatcacagtggtggctggagagcacaacatagaagaaacagagcacacagagcagaagagaaatgtgatcaggatcatccctcaccacaactacaatgcagccatcaacaagtacaaccatgacattgccctgctggaacttgatgagcctctggtgctgaacagctatgttacccccatctgcattgctgacaaggagtacaccaacatcttcctcaagtttggcagtggctatgtgtctggctggggcagagtgttccacaagggcaggtctgccctggtactgcaatacctgagagtccccctggtggacagggccacctgcctgagaagcaccaagttcaccatctacaacaacatgttctgtgctggcttccatgagggaggcagagacagctgccagggagactctggaggcccacatgtgacagaggtggagggcaccagcttcctgacaggcatcatcagctggggggaagagtgtgccatgaagggcaagtatggcatctacaccaaggttagcagatatgtgaactggatcaaagagaaaaccaagctgacctga

SEQ ID NO: 71 - DNA, 1296 bp, synthetic construct
  misc_feature 1..1296: note = Synthetic
  source 1..1296: mol_type = other DNA
ttcctggaccatgagaatgccaacaagatcctgaacagacccaagagatacaactctggcaagctggaggagtttgtgcaaggcaacctggagagagagtgcatggaagaaaagtgcagctttgaagaagcccgggaagtgtttgaaaacacagagagaaccactgagttctggaagcagtacgtggatggagaccagtgtgagagcaacccttgcctgaatggaggcagctgcaaggatgacatcaacagctacgaatgctggtgcccttttggctttgaaggcaaaaactgtgagctggatgtcacctgcaacatcaagaatggcagatgtgaacagttctgcaagaactctgctgacaacaaggtggtgtgcagctgcacagagggctacaggctggcagaaaaccagaagtcctgtgaacctgctgtccctttcccctgtggcagagtgtctgtgtcccagaccagcaagctgaccagggctgagactgtgttccctgatgtggactacgtgaacagcacagaggctgaaaccatcctggacaacatcacccagagcacccagtccttcaatgacttcacccgggtggtgggtggagaggatgccaagcctggccagttcccatggcaggtggtgctgaatggcaaagtggatgccttctgtggaggcagcattgtgaatgagaaatggattgtgacagccgcccactgtgtggagacaggtgtcaaaatcacagtggtggctggagagcacaacatagaagaaacagagcacacagagcagaagagaaatgtgatccggatcatccctcaccacaactacaatgcagccatcaacaagtacaaccacgacattgccctgctggaacttgatgagcctctggtgctgaacagctatgttacccccatctgcattgctgacaaggagtacaccaacatcttcctcaagtttggcagtggctatgtgtctggctggggcagagtgttccacaagggcaggtctgccctggtactgcaatacctgagagtccccctggtggacagggccacctgcctgagaagcaccaagttcaccatctacaacaacatgttctgtgccggcttccatgagggaggcagagacagctgccagggagactctggaggcccacacgtgacagaggtggagggcaccagcttcctgacaggcatcatcagctggggggaagagtgtgccatgaagggcaagtatggcatctacaccaaggttagcagatatgtgaactggatcaaagagaaaaccaagctgacctga

SEQ ID NO: 72 - DNA, 1296 bp, synthetic construct
  misc_feature 1..1296: note = Synthetic
  source 1..1296: mol_type = other DNA
ttcctggaccatgagaatgccaacaagatcctgaacagacccaagagatacaacagtggcaagctggaggaatttgtgcaaggcaacctggagagggagtgcatggaagagaagtgcagctttgaggaagccagggaagtgtttgagaacacagaaagaaccactgagttctggaagcagtatgttgatggagaccagtgtgagagcaacccttgcctgaatggaggctcctgcaaggatgacatcaacagctatgaatgctggtgcccttttggctttgaaggcaagaactgtgagctggatgtcacctgcaacatcaaaaatggcagatgtgaacagttctgcaagaactctgctgacaacaaggtggtgtgcagctgcacagagggctacaggctggcagaaaaccagaagtcctgtgaacctgctgtgcctttcccctgtggcagagtgtcagtgagccagaccagcaaactgaccagggctgagacagtgttccctgatgtggactatgtgaacagcacagaagctgaaaccatcctggacaacatcacccagagcacccagtccttcaatgacttcaccagggtggtgggtggagaggatgccaagcctggccagttcccatggcaggtggtgctcaatggcaaagtggatgccttctgtggaggcagcattgtgaatgaaaagtggattgtgacagctgcccactgtgtggagacaggtgtcaagatcacagtggtggctggagagcacaacattgaggaaacagagcacacagagcagaaaaggaatgtgatcagaatcatccctcaccacaactacaatgctgccatcaacaagtacaaccatgacattgccctgctggaacttgatgagcctctggtgctgaacagctatgttacccccatctgcattgctgacaaggagtacaccaacatcttcctgaagtttggctctggctatgtgtctggctggggcagagtgttccacaagggcaggtctgccctggtgctgcaatacctgagggtccccctggtggacagagccacctgcctgagaagcaccaagttcaccatctacaacaacatgttctgtgctggcttccatgagggaggcagagacagctgccagggagactctggaggcccacatgtgacagaggtggagggcaccagcttcctgacaggcatcatcagctggggggaagagtgtgccatgaagggcaagtatggcatctacaccaaggtgagcagatatgtcaactggatcaaagagaaaaccaagctgacctga

SEQ ID NO: 73 - DNA, 1296 bp, synthetic construct
  misc_feature 1..1296: note = Synthetic
  source 1..1296: mol_type = other DNA
ttcctggaccatgagaatgccaacaagatcctgaacagacccaagagatacaacagtggcaagctggaggaatttgtgcaaggcaacctggagagggagtgcatggaagagaagtgcagctttgaggaagcccgggaagtgttcgagaacacagaaagaaccactgagttctggaagcagtacgttgatggagaccagtgcgagagcaacccttgcctgaatggaggctcctgcaaggatgacatcaacagctacgaatgctggtgcccttttggctttgaaggcaagaactgtgagctggatgtcacctgcaacatcaaaaatggcagatgtgaacagttctgcaagaactctgctgacaacaaggtggtgtgcagctgcacagagggctacaggctggcagaaaaccagaagtcctgtgaacctgccgtgcctttcccctgtggcagagtgtcagtgagccagaccagcaaactgacccgggctgagacagtgttccctgatgtggactacgtgaacagcacagaagctgaaaccatcctggacaacatcacccagagcacccagtccttcaatgacttcacccgggtggtgggtggagaggatgccaagcctggccagttcccatggcaggtggtgctcaatggcaaagtggatgccttctgtggaggcagcattgtgaatgaaaagtggatcgtgacagccgcccactgtgtggagacaggtgtcaagatcacagtggtggctggagagcacaacatcgaggaaacagagcacacagagcagaaacggaatgtgatcagaatcatccctcaccacaactacaatgctgccatcaacaagtacaaccacgacattgccctgctggaacttgatgagcctctggtgctgaacagctatgttacccccatctgcattgccgacaaggagtacaccaacatcttcctgaagtttggctctggctacgtgtctggctggggcagagtgttccacaagggcaggtctgccctggtgctgcaatacctgcgggtccccctggtggacagagccacctgcctgagaagcaccaagttcaccatctacaacaacatgttctgtgccggcttccatgagggaggcagagacagctgccagggagactctggaggcccacacgtgacagaggtggagggcaccagcttcctgacaggcatcatcagctggggggaagagtgtgccatgaagggcaagtacggcatctacaccaaggtgagcagatatgtcaactggatcaaagagaaaaccaagctgacctga

SEQ ID NO: 74 - DNA, 3570 bp, synthetic construct
  misc_feature 1..3570: note = Synthetic
  misc_feature 1..145: note = ITR
  misc_feature 154..253: note = Splice acceptor
  misc_feature 256..1551: note = F9 wildtype
  misc_feature 1555..1782: note = bGH pA
  misc_feature 1889..2019: note = SV40 pA
  misc_feature 2020..3315: note = F9 codon optimized
  misc_feature 3318..3417: note = Splice acceptor
  misc_feature 3426..3570: note = ITR
  source 1..3570: mol_type = other DNA
ttggccactccctctctgcgcgctcgctcgctcactgaggccgggcgaccaaaggtcgcccgacgcccgggctttgcccgggcggcctcagtgagcgagcgagcgcgcagagagggagtggccaactccatcactaggggttcctagatctcttaggtcagtgaagagaagaacaaaaagcagcatattacagttagttgtcttcatcaatctttaaatatgttgtgtggtttttctctccctgtttccacagtttttcttgatcatgaaaacgccaacaaaattctgaatcggccaaagaggtataattcaggtaaattggaagagtttgttcaagggaaccttgagagagaatgtatggaagaaaagtgtagttttgaagaagcacgagaagtttttgaaaacactgaaagaacaactgaattttggaagcagtatgttgatggagatcagtgtgagtccaatccatgtttaaatggcggcagttgcaaggatgacattaattcctatgaatgttggtgtccctttggatttgaaggaaagaactgtgaattagatgtaacatgtaacattaagaatggcagatgcgagcagttttgtaaaaatagtgctgataacaaggtggtttgctcctgtactgagggatatcgacttgcagaaaaccagaagtcctgtgaaccagcagtgccatttccatgtggaagagtttctgtttcacaaacttctaagctcacccgtgctgagactgtttttcctgatgtggactatgtaaattctactgaagctgaaaccattttggataacatcactcaaagcacccaatcatttaatgacttcactcgggttgttggtggagaagatgccaaaccaggtcaattcccttggcaggttgttttgaatggtaaagttgatgcattctgtggaggctctatcgttaatgaaaaatggattgtaactgctgcccactgtgttgaaactggtgttaaaattacagttgtcgcaggtgaacataatattgaggagacagaacatacagagcaaaagcgaaatgtgattcgaattattcctcaccacaactacaatgcagctattaataagtacaaccatgacattgcccttctggaactggacgaacccttagtgctaaacagctacgttacacctatttgcattgctgacaaggaatacacgaacatcttcctcaaatttggatctggctatgtaagtggctggggaagagtcttccacaaagggagatcagctttagttcttcagtaccttagagttccacttgttgaccgagccacatgtcttcgatctacaaagttcaccatctataacaacatgttctgtgctggcttccatgaaggaggtagagattcatgtcaaggagatagtgggggaccccatgttactgaagtggaagggaccagtttcttaactggaattattagctggggtgaagagtgtgcaatgaaaggcaaatatggaatatataccaaggtatcccggtatgtcaactggattaaggaaaaaacaaagctcacttaacctcgactgtgccttctagttgccagccatctgttgtttgcccctcccccgtgccttccttgaccctggaaggtgccactcccactgtcctttcctaataaaatgaggaaattgcatcgcattgtctgagtaggtgtcattctattctggggggtggggtggggcaggacagcaagggggaggattgggaagacaatagcaggcatgctggggatgcggtgggctctatggcttctgaggcggaaagaaccagctggggctctagggggtatccccaaaaaacctcccacacctccccctgaacctgaaacataaaatgaatgcaattgttgttgttaacttgtttattgcagcttataatggttacaaataaagcaatagcatcacaaatttcacaaataaagcatttttttcactgcattctagttgtggtttgtccaaactcatcaatgtatcttatcatgtctgttaggtgagcttagtcttttcttttatccaattcacgtagcgagagaccttcgtatagatgccatatttccccttcatcgcacattcctccccccaacttattatcccggtcaagaaacttgttccttcgacttcagtgacgtgtggtccacctgaatcaccttggcatgagtcgcgaccgccctcgtgaaacccagcacaaaacatgttattgtaaatcgtaaatttcgtggaccgaagacaggtcgctctatcgaccaacgggacgcgcaaatattgcagaacgagggctgatcgacctttgtggaagacccgcccccacccactcacatatccgctcccaaatttcaagaagatatttgtatattctttatcggctatacaaatcggggtaacataggagttaagtacgagtggctcgtccagctccaggagggctatatcatggttgtacttgtttatagcggcattataattgtgatggggtatgatcctgataacattccttttctgttcagtatgctcagtttcttcaatgttgtgttcgccagccacgaccgtaatcttaacccccgtctcgacacagtgtgcggccgttacaatccacttttcattgactatggagcccccacaaaacgcgtcgacttttccgttgagcaccacctgccatggaaattggccaggtttagcgtcctcgcccccgacaaccctagtaaagtcattaaatgactgtgtggattgtgttatattatcaagaatcgtttcggcttcagtagagttaacgtagtccacatcgggaaaaactgtctcggcccttgtcaactttgatgtctgggacacacttacccgaccgcacgggaagggcaccgccggttcacagctcttttgattctcagcgagccggtagccctcagtgcaactacacacaactttgttgtcggcggaatttttacagaattgctcgcatcgtccatttttaatgttgcaggtgacgtccaactcgcagttttttccttcaaaaccaaaagggcaccaacactcgtaggaatttatatcgtctttacaactccccccattcagacatggattagattcgcattggtccccatcgacatattgcttccagaactcagtggtccgttctgtattctcaaacacctcgcgcgcttcttcaaaactgcatttttcctccatacactctcgctccaagttcccttgcacgaattcttcaagctttcctgagttataccttttaggccggttaagtatcttattcgcgttttcgtggtccagaaaaactgtggaaacagggagagaaaaaccacacaacatatttaaagattgatgaagacaactaactgtaatatgctgctttttgttcttctcttcactgacctaagagatctaggaacccctagtgatggagttggccactccctctctgcgcgctcgctcgctcactgaggccgcccgggcaaagcccgggcgtcgggcgacctttggtcgcccggcctcagtgagcgagcgagcgcgcagagagggagtggccaa

SEQ ID NO: 75 - DNA, 3570 bp, synthetic construct
  misc_feature 1..3570: note = Synthetic
  source 1..3570: mol_type = other DNA
ttggccactccctctctgcgcgctcgctcgctcactgaggccgggcgaccaaaggtcgcccgacgcccgggctttgcccgggcggcctcagtgagcgagcgagcgcgcagagagggagtggccaactccatcactaggggttcctagatctcttaggtcagtgaagagaagaacaaaaagcagcatattacagttagttgtcttcatcaatctttaaatatgttgtgtggtttttctctccctgtttccacagtttttcttgatcatgaaaacgccaacaaaattctgaatcggccaaagaggtataattcaggtaaattggaagagtttgttcaagggaaccttgagagagaatgtatggaagaaaagtgtagttttgaagaagcacgagaagtttttgaaaacactgaaagaacaactgaattttggaagcagtatgttgatggagatcagtgtgagtccaatccatgtttaaatggcggcagttgcaaggatgacattaattcctatgaatgttggtgtccctttggatttgaaggaaagaactgtgaattagatgtaacatgtaacattaagaatggcagatgcgagcagttttgtaaaaatagtgctgataacaaggtggtttgctcctgtactgagggatatcgacttgcagaaaaccagaagtcctgtgaaccagcagtgccatttccatgtggaagagtttctgtttcacaaacttctaagctcacccgtgctgagactgtttttcctgatgtggactatgtaaattctactgaagctgaaaccattttggataacatcactcaaagcacccaatcatttaatgacttcactcgggttgttggtggagaagatgccaaaccaggtcaattcccttggcaggttgttttgaatggtaaagttgatgcattctgtggaggctctatcgttaatgaaaaatggattgtaactgctgcccactgtgttgaaactggtgttaaaattacagttgtcgcaggtgaacataatattgaggagacagaacatacagagcaaaagcgaaatgtgattcgaattattcctcaccacaactacaatgcagctattaataagtacaaccatgacattgcccttctggaactggacgaacccttagtgctaaacagctacgttacacctatttgcattgctgacaaggaatacacgaacatcttcctcaaatttggatctggctatgtaagtggctggggaagagtcttccacaaagggagatcagctttagttcttcagtaccttagagttccacttgttgaccgagccacatgtcttcgatctacaaagttcaccatctataacaacatgttctgtgctggcttccatgaaggaggtagagattcatgtcaaggagatagtgggggaccccatgttactgaagtggaagggaccagtttcttaactggaattattagctggggtgaagagtgtgcaatgaaaggcaaatatggaatatataccaaggtatcccggtatgtcaactggattaaggaaaaaacaaagctcacttaacctcgactgtgccttctagttgccagccatctgttgtttgcccctcccccgtgccttccttgaccctggaaggtgccactcccactgtcctttcctaataaaatgaggaaattgcatcgcattgtctgagtaggtgtcattctattctggggggtggggtggggcaggacagcaagggggaggattgggaagacaatagcaggcatgctggggatgcggtgggctctatggcttctgaggcggaaagaaccagctggggctctagggggtatccccaaaaaacctcccacacctccccctgaacctgaaacataaaatgaatgcaattgttgttgttaacttgtttattgcagcttataatggttacaaataaagcaatagcatcacaaatttcacaaataaagcatttttttcactgcattctagttgtggtttgtccaaactcatcaatgtatcttatcatgtctgtcaagtcagcttggttttctccttaatccagttcacatatctggatacttttgtgtagatcccatactttcccttcatagcacactcctcaccccagctgataatcccagtcaggaagctggttccctccacctcagtcacatggggacccccagaatctccctggcagctgtctctaccaccttcatggaaccctgcacagaacatattgttgtagattgtaaacttggtgctcctcaagcaggttgctctatccaccagaggcaccctcaaatactgcaataccagggcagacctgcctttatggaacaccctgccccagccagacacatatccagacccaaatttcaagaagatgttggtgtactctttatcagcaatacagatgggtgtcacatagctgttcaagaccaggggttcatccagttccaggagggcaatgtcatggttgtacttgttgatagcagcattgtagttgtggtgggggataatcctgatcacattcctcttctgctcagtgtgctcagtttcctcaatattgtgctctccagccaccacagtaatcttgactccagtttccacacagtgggctgcagtcacaatccacttctcatttacaattgaacctccacaaaaggcatccacttttccattgagcactacctgccaggggaactgcccaggcttggcatcctcccctcctaccaccctggtgaagtcattgaagctctgtgtgctctgagtgatattgtcaaggattgtctcagcctcagtgctattcacataatctacatcaggaaagactgtttcagccctagtcagcttgctggtttggctcacagacactctcccacagggaaaaggcactgcaggttcacagctcttctggttttcagccagcctatatccctcagtgcagctacagaccactttgttatcagcagaattcttgcaaaattgctcacacctgccattcttgatattacaggtcacatcaagctcacagtttttcccctcaaatccaaagggacaccaacattcatagctgttgatatcatctttacagctccccccattcaagcagggattgctctcacattgatcaccatccacatactgcttccaaaattcagttgttctctctgtattttcaaacacttctctggcttcctcaaagctgcacttctcttccatacactctctctccagattcccctgtacaaactcttcaagcttgccagagttatacctctttggtctattcagaattttgttggcattttcatgatcaagaaaaactgtggaaacagggagagaaaaaccacacaacatatttaaagattgatgaagacaactaactgtaatatgctgctttttgttcttctcttcactgacctaagagatctaggaacccctagtgatggagttggccactccctctctgcgcgctcgctcgctcactgaggccgcccgggcaaagcccgggcgtcgggcgacctttggtcgcccggcctcagtgagcgagcgagcgcgcagagagggagtggccaa

SEQ ID NO: 76 - DNA, 3570 bp, synthetic construct
  misc_feature 1..3570: note = Synthetic
  source 1..3570: mol_type = other DNA
ttggccactccctctctgcgcgctcgctcgctcactgaggccgggcgaccaaaggtcgcccgacgcccgggctttgcccgggcggcctcagtgagcgagcgagcgcgcagagagggagtggccaactccatcactaggggttcctagatctcttaggtcagtgaagagaagaacaaaaagcagcatattacagttagttgtcttcatcaatctttaaatatgttgtgtggtttttctctccctgtttccacagtttttcttgatcatgaaaacgccaacaaaattctgaatcggccaaagaggtataattcaggtaaattggaagagtttgttcaagggaaccttgagagagaatgtatggaagaaaagtgtagttttgaagaagcacgagaagtttttgaaaacactgaaagaacaactgaattttggaagcagtatgttgatggagatcagtgtgagtccaatccatgtttaaatggcggcagttgcaaggatgacattaattcctatgaatgttggtgtccctttggatttgaaggaaagaactgtgaattagatgtaacatgtaacattaagaatggcagatgcgagcagttttgtaaaaatagtgctgataacaaggtggtttgctcctgtactgagggatatcgacttgcagaaaaccagaagtcctgtgaaccagcagtgccatttccatgtggaagagtttctgtttcacaaacttctaagctcacccgtgctgagactgtttttcctgatgtggactatgtaaattctactgaagctgaaaccattttggataacatcactcaaagcacccaatcatttaatgacttcactcgggttgttggtggagaagatgccaaaccaggtcaattcccttggcaggttgttttgaatggtaaagttgatgcattctgtggaggctctatcgttaatgaaaaatggattgtaactgctgcccactgtgttgaaactggtgttaaaattacagttgtcgcaggtgaacataatattgaggagacagaacatacagagcaaaagcgaaatgtgattcgaattattcctcaccacaactacaatgcagctattaataagtacaaccatgacattgcccttctggaactggacgaacccttagtgctaaacagctacgttacacctatttgcattgctgacaaggaatacacgaacatcttcctcaaatttggatctggctatgtaagtggctggggaagagtcttccacaaagggagatcagctttagttcttcagtaccttagagttccacttgttgaccgagccacatgtcttcgatctacaaagttcaccatctataacaacatgttctgtgctggcttccatgaaggaggtagagattcatgtcaaggagatagtgggggaccccatgttactgaagtggaagggaccagtttcttaactggaattattagctggggtgaagagtgtgcaatgaaaggcaaatatggaatatataccaaggtatcccggtatgtcaactggattaaggaaaaaacaaagctcacttaacctcgactgtgccttctagttgccagccatctgttgtttgcccctcccccgtgccttccttgaccctggaaggtgccactcccactgtcctttcctaataaaatgaggaaattgcatcgcattgtctgagtaggtgtcattctattctggggggtggggtggggcaggacagcaagggggaggattgggaagacaatagcaggcatgctggggatgcggtgggctctatggcttctgaggcggaaagaaccagctggggctctagggggtatccccaaaaaacctcccacacctccccctgaacctgaaacataaaatgaatgcaattgttgttgttaacttgtttattgcagcttataatggttacaaataaagcaatagcatcacaaatttcacaaataaagcatttttttcactgcattctagttgtggtttgtccaaactcatcaatgtatcttatcatgtctgtcaggtcagcttggtcttctccttgatccagttcacatacctgctcaccttggtgtagatgccatacttgcccttcatggcacactcctccccccagctgatgatgcctgtcaggaagctggtgccctccacctctgtcacatgggggcccccagagtctccctggcagctgtctctgcctccctcatggaagccagcacagaacatgttgttgtagatggtgaacttggtgctcctcaggcaggtggccctgtccaccaggggcactctcaggtactgcagcaccagggcagacctgcccttgtggaacactctgccccagccagacacatagccagagccaaacttcaggaagatgttggtgtactccttgtcagcaatgcagatgggggtcacatagctgttcagcaccaggggctcatccagctccagcagggcaatgtcatggttgtacttgttgatggcagcattgtagttgtggtgggggatgatcctgatcacattcctcttctgctctgtgtgctctgtctcctcaatgttgtgctccccagccaccactgtgatcttcacccctgtctccacacagtgggcagctgtcacaatccacttctcattcacaatgctgcctccacagaaggcatccaccttgccattcagcaccacctgccaggggaactggccaggcttggcatcctctccccccaccaccctggtgaagtcattgaagctctgggtgctctgggtgatgttgtccaggatggtctcagcctctgtgctgttcacatagtccacatcagggaacactgtctcagccctggtcagcttgctggtctggctcacagacactctgccacaggggaagggcacagcaggctcacagctcttctggttctcagccagcctgtagccctctgtgcagctgcacaccaccttgttgtcagcagagttcttgcagaactgctcacatctgccattcttgatgttgcaggtcacatccagctcacagttcttgccctcaaagccaaaggggcaccagcactcatagctgttgatgtcatccttgcagctgcctccattcaggcaggggttgctctcacactggtctccatccacatactgcttccagaactctgtggttctctctgtgttctcaaacacctccctggcctcctcaaagctgcacttctcctccatgcactctctctccaggttgccctgcacaaactcctccagcttgccagagttgtacctcttgggcctgttcaggatcttgttggcattctcatggtccaggaaaactgtggaaacagggagagaaaaaccacacaacatatttaaagattgatgaagacaactaactgtaatatgctgctttttgttcttctcttcactgacctaagagatctaggaacccctagtgatggagttggccactccctctctgcgcgctcgctcgctcactgaggccgcccgggcaaagcccgggcgtcgggcgacctttggtcgcccggcctcagtgagcgagcgagcgcgcagagagggagtggccaa

SEQ ID NO: 77 - DNA, 3570 bp, synthetic construct
  misc_feature 1..3570: note = Synthetic
  source 1..3570: mol_type = other DNA
ttggccactccctctctgcgcgctcgctcgctcactgaggccgggcgaccaaaggtcgcccgacgcccgggctttgcccgggcggcctcagtgagcgagcgagcgcgcagagagggagtggccaactccatcactaggggttcctagatctcttaggtcagtgaagagaagaacaaaaagcagcatattacagttagttgtcttcatcaatctttaaatatgttgtgtggtttttctctccctgtttccacagtttttcttgatcatgaaaacgccaacaaaattctgaatcggccaaagaggtataattcaggtaaattggaagagtttgttcaagggaaccttgagagagaatgtatggaagaaaagtgtagttttgaagaagcacgagaagtttttgaaaacactgaaagaacaactgaattttggaagcagtatgttgatggagatcagtgtgagtccaatccatgtttaaatggcggcagttgcaaggatgacattaattcctatgaatgttggtgtccctttggatttgaaggaaagaactgtgaattagatgtaacatgtaacattaagaatggcagatgcgagcagttttgtaaaaatagtgctgataacaaggtggtttgctcctgtactgagggatatcgacttgcagaaaaccagaagtcctgtgaaccagcagtgccatttccatgtggaagagtttctgtttcacaaacttctaagctcacccgtgctgagactgtttttcctgatgtggactatgtaaattctactgaagctgaaaccattttggataacatcactcaaagcacccaatcatttaatgacttcactcgggttgttggtggagaagatgccaaaccaggtcaattcccttggcaggttgttttgaatggtaaagttgatgcattctgtggaggctctatcgttaatgaaaaatggattgtaactgctgcccactgtgttgaaactggtgttaaaattacagttgtcgcaggtgaacataatattgaggagacagaacatacagagcaaaagcgaaatgtgattcgaattattcctcaccacaactacaatgcagctattaataagtacaaccatgacattgcccttctggaactggacgaacccttagtgctaaacagctacgttacacctatttgcattgctgacaaggaatacacgaacatcttcctcaaatttggatctggctatgtaagtggctggggaagagtcttccacaaagggagatcagctttagttcttcagtaccttagagttccacttgttgaccgagccacatgtcttcgatctacaaagttcaccatctataacaacatgttctgtgctggcttccatgaaggaggtagagattcatgtcaaggagatagtgggggaccccatgttactgaagtggaagggaccagtttcttaactggaattattagctggggtgaagagtgtgcaatgaaaggcaaatatggaatatataccaaggtatcccggtatgtcaactggattaaggaaaaaacaaagctcacttaacctcgactgtgccttctagttgccagccatctgttgtttgcccctcccccgtgccttccttgaccctggaaggtgccactcccactgtcctttcctaataaaatgaggaaattgcatcgcattgtctgagtaggtgtcattctattctggggggtggggtggggcaggacagcaagggggaggattgggaagacaatagcaggcatgctggggatgcggtgggctctatggcttctgaggcggaaagaaccagctggggctctagggggtatccccaaaaaacctcccacacctccccctgaacctgaaacataaaatgaatgcaattgttgttgttaacttgtttattgcagcttataatggttacaaataaagcaatagcatcacaaatttcacaaataaagcatttttttcactgcattctagttgtggtttgtccaaactcatcaatgtatcttatcatgtctgtcaggtgagcttggtcttttctttgatccagttgacatatctggacaccttggtgtagatgccatatttgcccttcatggcacactcttctccccagctgatgatgcctgtcagaaagctggtgccttccacctctgtcacatgagggccaccactatctccctggcaggagtctctgccaccttcatggaacccagcacagaacatgttgttgtagatggtgaacttggtgcttctcagacaggtggctctatccaccaggggcactctcaggtactgcagcaccagggcagaccttcccttgtggaacactctaccccagccagacacatagccagagccaaacttcagaaagatgttggtgtactctttgtcagcaatgcagataggggtcacataggagttcaggaccaggggctcatccagctcaagcagggcaatgtcatggttgtacttgttgatggcagcattgtagttgtggtgagggatgatcctgatgacattcctcttttgctctgtgtgctctgtttcctcaatgttgtgctccccagccaccactgtgatcttgacccctgtttccacacagtgggcagctgtcacaatccacttctcattcacaatggagccaccacagaaggcatccactttgccattcagcaccacttgccaagggaactgtccaggcttggcatcttcccctccaacaactcttgtgaagtcattgaaggactgggtgctctgggtgatgttgtccaggatggtttcagcctctgtggagttcacatagtccacatcagggaacactgtctcagctctggtcagcttgctggtctgggacacagacactctgccacatggaaagggcacagcaggttcacagcttttctggttctcagccagtctgtagccctctgtgcaggagcacacaaccttgttgtcagcagagttcttgcagaactgttcacatctgccattcttgatgttgcaggtcacatccagttcacagttcttgccctcaaagccaaaggggcaccagcactcatagctgttgatgtcatccttgcagctgccaccattcaggcaggggttgctttcacactggtccccatccacatactgcttccagaactctgtggttctctctgtgttctcaaacacttccctggcctcttcaaagctgcacttctcttccatgcattccctttccaggttgccctgcacaaactcttccagcttgccagagttgtacctcttgggcctgttcaggatcttgttggcattctcatggtccaggaaaactgtggaaacagggagagaaaaaccacacaacatatttaaagattgatgaagacaactaactgtaatatgctgctttttgttcttctcttcactgacctaagagatctaggaacccctagtgatggagttggccactccctctctgcgcgctcgctcgctcactgaggccgcccgggcaaagcccgggcgtcgggcgacctttggtcgcccggcctcagtgagcgagcgagcgcgcagagagggagtggccaa

SEQ ID NO: 78 - DNA, 3570 bp, synthetic construct
  misc_feature 1..3570: note = Synthetic
  source 1..3570: mol_type = other DNA
ttggccactccctctctgcgcgctcgctcgctcactgaggccgggcgaccaaaggtcgcccgacgcccgggctttgcccgggcggcctcagtgagcgagcgagcgcgcagagagggagtggccaactccatcactaggggttcctagatctcttaggtcagtgaagagaagaacaaaaagcagcatattacagttagttgtcttcatcaatctttaaatatgttgtgtggtttttctctccctgtttccacagtttttcttgatcatgaaaacgccaacaaaattctgaatcggccaaagaggtataattcaggtaaattggaagagtttgttcaagggaaccttgagagagaatgtatggaagaaaagtgtagttttgaagaagcacgagaagtttttgaaaacactgaaagaacaactgaattttggaagcagtatgttgatggagatcagtgtgagtccaatccatgtttaaatggcggcagttgcaaggatgacattaattcctatgaatgttggtgtccctttggatttgaaggaaagaactgtgaattagatgtaacatgtaacattaagaatggcagatgcgagcagttttgtaaaaatagtgctgataacaaggtggtttgctcctgtactgagggatatcgacttgcagaaaaccagaagtcctgtgaaccagcagtgccatttccatgtggaagagtttctgtttcacaaacttctaagctcacccgtgctgagactgtttttcctgatgtggactatgtaaattctactgaagctgaaaccattttggataacatcactcaaagcacccaatcatttaatgacttcactcgggttgttggtggagaagatgccaaaccaggtcaattcccttggcaggttgttttgaatggtaaagttgatgcattctgtggaggctctatcgttaatgaaaaatggattgtaactgctgcccactgtgttgaaactggtgttaaaattacagttgtcgcaggtgaacataatattgaggagacagaacatacagagcaaaagcgaaatgtgattcgaattattcctcaccacaactacaatgcagctattaataagtacaaccatgacattgcccttctggaactggacgaacccttagtgctaaacagctacgttacacctatttgcattgctgacaaggaatacacgaacatcttcctcaaatttggatctggctatgtaagtggctggggaagagtcttccacaaagggagatcagctttagttcttcagtaccttagagttccacttgttgaccgagccacatgtcttcgatctacaaagttcaccatctataacaacatgttctgtgctggcttccatgaaggaggtagagattcatgtcaaggagatagtgggggaccccatgttactgaagtggaagggaccagtttcttaactggaattattagctggggtgaagagtgtgcaatgaaaggcaaatatggaatatataccaaggtatcccggtatgtcaactggattaaggaaaaaacaaagctcacttaacctcgactgtgccttctagttgccagccatctgttgtttgcccctcccccgtgccttccttgaccctggaaggtgccactcccactgtcctttcctaataaaatgaggaaattgcatcgcattgtctgagtaggtgtcattctattctggggggtggggtggggcaggacagcaagggggaggattgggaagacaatagcaggcatgctggggatgcggtgggctctatggcttctgaggcggaaagaaccagctggggctctagggggtatccccaaaaaacctcccacacctccccctgaacctgaaacataaaatgaatgcaattgttgttgttaacttgtttattgcagcttataatggttacaaataaagcaatagcatcacaaatttcacaaataaagcatttttttcactgcattctagttgtggtttgtccaaactcatcaatgtatcttatcatgtctgtcaggtcagtttggttttttctttgatccagttcacatatctggacaccttggtgtagatgccatacttgcccttcatggcacattcctctccccagctgatgatgcctgtcaggaagctggtgccctccacctctgtcacatgtgggcctccagagtctccttggcagctgtctctgcctccctcatggaagccagcacagaacatgttgttgtagatggtgaacttggtgcttctcaggcaggtggctctgtccaccagggggactctcaggtattgcagcaccagggcagacctgcccttgtggaacactctgccccagccagacacatagccagagccaaacttcaggaagatgttggtgtactctttgtctgcaatgcagatgggggtaacatagctgttcagcaccagaggctcatcaagttccagcagggcaatgtcatggttgtacttgttgatggctgcattgtagttgtggtgagggatgatcctgatcacatttctcttctgctctgtgtgctctgtttcttctatgttgtgttcaccagccaccactgtgatcttgacacctgtttccacacagtgggcagctgtcacaatccatttttcattcacaatgctgcccccacagaaggcatccaccttgccattcagcaccacctgccatgggaactggccaggcttggcatcctctcctcccaccactctggtgaagtcattgaagctctgggtgctctgggtgatgttgtccaggatggtctcagcctcagtgctgttcacatagtccacatcagggaacactgtttcagccctggtcagcttggaggtctgggacacagacactctgccacaggggaaagggacagcaggttcacagctcttctggttttcagccagcctgtagccctctgtgcagctgcacaccaccttgttgtctgctgagttcttgcagaactgttcacatctgccattcttgatgttgcaggtgacatccagctcacagttcttgccctcaaagccaaaagggcaccagcactcatagctgttgatgtcatctttgcagctgcctccattcaggcaagggttgctctcacactggtctccatcaacatactgcttccagaactcagtggttctctctgtgttttcaaacacttctctggcttcctcaaagctgcacttctcttccatgcactccctctccaggttgccctgcacaaactcctccagcttgccactgttgtatctcttgggtctgttgaggatcttgttggcattctcatggtccaggaaaactgtggaaacagggagagaaaaaccacacaacatatttaaagattgatgaagacaactaactgtaatatgctgctttttgttcttctcttcactgacctaagagatctaggaacccctagtgatggagttggccactccctctctgcgcgctcgctcgctcactgaggccgcccgggcaaagcccgggcgtcgggcgacctttggtcgcccggcctcagtgagcgagcgagcgcgcagagagggagtggccaa

SEQ ID NO: 79 - DNA, 3570 bp, synthetic construct
  misc_feature 1..3570: note = Synthetic
  source 1..3570: mol_type = other DNA
ttggccactccctctctgcgcgctcgctcgctcactgaggccgggcgaccaaaggtcgcccgacgcccgggctttgcccgggcggcctcagtgagcgagcgagcgcgcagagagggagtggccaactccatcactaggggttcctagatctcttaggtcagtgaagagaagaacaaaaagcagcatattacagttagttgtcttcatcaatctttaaatatgttgtgtggtttttctctccctgtttccacagtttttcttgatcatgaaaatgccaacaaaattctgaataggccaaagaggtataattcagggaaattggaagagtttgttcaagggaaccttgagagagaatgtatggaagaaaagtgtagttttgaagaagcaagagaagtttttgaaaacactgaaagaacaactgaattttggaagcagtatgttgatggagatcagtgcgagtccaatccatgtttaaatgggggcagttgcaaggatgacattaattcctatgaatgttggtgtccctttggatttgaaggaaagaactgtgaattagatgtaacatgtaacattaagaatggcagatgtgagcagttttgtaaaaatagtgctgataacaaggtggtttgctcctgtactgagggatatagacttgcagaaaaccagaagtcctgtgaaccagcagtgccatttccatgtggaagagtttctgtttcacaaacttctaagctcaccagagctgagactgtttttcctgatgtggactatgtaaattctactgaagctgaaaccattttggataacatcactcaaagcacccaatcatttaatgacttcactagggttgttggtggagaagatgccaaaccaggacaattcccttggcaggttgttttgaatggtaaagttgatgcattctgtggaggctctattgttaatgaaaaatggattgtaactgctgcccactgtgttgaaactggtgttaaaattacagttgtggcaggtgaacataatattgaggagacagaacatacagagcaaaagagaaatgtgattagaattattcctcaccacaactacaatgcagctattaataagtacaaccatgacattgcccttctggaactggatgaacccttagtgctaaacagctatgttacacctatttgcattgctgacaaggaatacaccaacatcttcctcaaatttggatctggctatgtaagtggctggggaagagtcttccacaaagggagatcagctttagttcttcagtaccttagagttccacttgttgacagagccacatgtcttaggtctacaaagttcaccatctataacaacatgttctgtgctggcttccatgaaggaggtagagattcatgtcaaggagatagtgggggaccccatgttactgaagtggaagggaccagtttcttaactggaattattagctggggtgaagagtgtgcaatgaaaggcaaatatggaatatataccaaggtatccaggtatgtcaactggattaaggaaaaaacaaagctcacttaacctctactgtgccttctagttgccagccatctgttgtttgcccctcccccttgccttccttgaccctggaaggtgccactcccactgtcctttcctaataaaatgaggaaattgcatcacattgtctgagtaggtgtcattctattctggggggtggggtggggcaggacagcaagggggaggattgggaagacaatagcaggcatgctggggatgcagtgggctctatggcttctgaggtggaaagaaccagctggggctctagggggtatccccaaaaaacctcccacacctccccctgaacctgaaacataaaatgaatgcaattgttgttgttaacttgtttattgcagcttataatggttacaaataaagcaatagcatcacaaatttcacaaataaagcatttttttcactgcattctagttgtggtttgtccaaactcatcaatgtatcttatcatgtctgtcaagtcagcttggttttctccttaatccagttcacatatctggatacttttgtgtagatcccatactttcccttcatagcacactcctcaccccagctgataatcccagtcaggaagctggttccctccacctcagtcacatggggacccccagaatctccctggcagctgtctctaccaccttcatggaaccctgcacagaacatattgttgtagattgtaaacttggtgctcctcaagcaggttgctctatccaccagaggcaccctcaaatactgcaataccagggcagacctgcctttatggaacaccctgccccagccagacacatatccagacccaaatttcaagaagatgttggtgtactctttatcagcaatacagatgggtgtcacatagctgttcaagaccaggggttcatccagttccaggagggcaatgtcatggttgtacttgttgatagcagcattgtagttgtggtgggggataatcctgatcacattcctcttctgctcagtgtgctcagtttcctcaatattgtgctctccagccaccacagtaatcttgactccagtttccacacagtgggctgcagtcacaatccacttctcatttacaattgaacctccacaaaaggcatccacttttccattgagcactacctgccaggggaactgcccaggcttggcatcctcccctcctaccaccctggtgaagtcattgaagctctgtgtgctctgagtgatattgtcaaggattgtctcagcctcagtgctattcacataatctacatcaggaaagactgtttcagccctagtcagcttgctggtttggctcacagacactctcccacagggaaaaggcactgcaggttcacagctcttctggttttcagccagcctatatccctcagtgcagctacagaccactttgttatcagcagaattcttgcaaaattgctcacacctgccattcttgatattacaggtcacatcaagctcacagtttttcccctcaaatccaaagggacaccaacattcatagctgttgatatcatctttacagctccccccattcaagcagggattgctctcacattgatcaccatccacatactgcttccaaaattcagttgttctctctgtattttcaaacacttctctggcttcctcaaagctgcacttctcttccatacactctctctccagattcccctgtacaaactcttcaagcttgccagagttatacctctttggtctattcagaattttgttggcattttcatgatcaagaaaaactgtggaaacagggagagaaaaaccacacaacatatttaaagattgatgaagacaactaactgtaatatgctgctttttgttcttctcttcactgacctaagagatctaggaacccctagtgatggagttggccactccctctctgcgcgctcgctcgctcactgaggccgcccgggcaaagcccgggcgtcgggcgacctttggtcgcccggcctcagtgagcgagcgagcgcgcagagagggagtggccaa

SEQ ID NO: 80 - DNA, 3570 bp, synthetic construct
  misc_feature 1..3570: note = Synthetic
  source 1..3570: mol_type = other DNA
ttggccactccctctctgcgcgctcgctcgctcactgaggccgggcgaccaaaggtcgcccgacgcccgggctttgcccgggcggcctcagtgagcgagcgagcgcgcagagagggagtggccaactccatcactaggggttcctagatctcttaggtcagtgaagagaagaacaaaaagcagcatattacagttagttgtcttcatcaatctttaaatatgttgtgtggtttttctctccctgtttccacagtttttcttgatcatgaaaatgccaacaaaattctgaataggccaaagaggtataattcagggaaattggaagagtttgttcaagggaaccttgagagagaatgtatggaagaaaagtgtagttttgaagaagcaagagaagtttttgaaaacactgaaagaacaactgaattttggaagcagtatgttgatggagatcagtgcgagtccaatccatgtttaaatgggggcagttgcaaggatgacattaattcctatgaatgttggtgtccctttggatttgaaggaaagaactgtgaattagatgtaacatgtaacattaagaatggcagatgtgagcagttttgtaaaaatagtgctgataacaaggtggtttgctcctgtactgagggatatagacttgcagaaaaccagaagtcctgtgaaccagcagtgccatttccatgtggaagagtttctgtttcacaaacttctaagctcaccagagctgagactgtttttcctgatgtggactatgtaaattctactgaagctgaaaccattttggataacatcactcaaagcacccaatcatttaatgacttcactagggttgttggtggagaagatgccaaaccaggacaattcccttggcaggttgttttgaatggtaaagttgatgcattctgtggaggctctattgttaatgaaaaatggattgtaactgctgcccactgtgttgaaactggtgttaaaattacagttgtggcaggtgaacataatattgaggagacagaacatacagagcaaaagagaaatgtgattagaattattcctcaccacaactacaatgcagctattaataagtacaaccatgacattgcccttctggaactggatgaacccttagtgctaaacagctatgttacacctatttgcattgctgacaaggaatacaccaacatcttcctcaaatttggatctggctatgtaagtggctggggaagagtcttccacaaagggagatcagctttagttcttcagtaccttagagttccacttgttgacagagccacatgtcttaggtctacaaagttcaccatctataacaacatgttctgtgctggcttccatgaaggaggtagagattcatgtcaaggagatagtgggggaccccatgttactgaagtggaagggaccagtttcttaactggaattattagctggggtgaagagtgtgcaatgaaaggcaaatatggaatatataccaaggtatccaggtatgtcaactggattaaggaaaaaacaaagctcacttaacctctactgtgccttctagttgccagccatctgttgtttgcccctcccccttgccttccttgaccctggaaggtgccactcccactgtcctttcctaataaaatgaggaaattgcatcacattgtctgagtaggtgtcattctattctggggggtggggtggggcaggacagcaagggggaggattgggaagacaatagcaggcatgctggggatgcagtgggctctatggcttctgaggtggaaagaaccagctggggctctagggggtatccccaaaaaacctcccacacctccccctgaacctgaaacataaaatgaatgcaattgttgttgttaacttgtttattgcagcttataatggttacaaataaagcaatagcatcacaaatttcacaaataaagcatttttttcactgcattctagttgtggtttgtccaaactcatcaatgtatcttatcatgtctgtcaggtcagcttggtcttctccttgatccagttcacatacctgctcaccttggtgtagatgccatacttgcccttcatggcacactcctccccccagctgatgatgcctgtcaggaagctggtgccctccacctctgtcacatgggggcccccagagtctccctggcagctgtctctgcctccctcatggaagccagcacagaacatgttgttgtagatggtgaacttggtgctcctcaggcaggtggccctgtccaccaggggcactctcaggtactgcagcaccagggcagacctgcccttgtggaacactctgccccagccagacacatagccagagccaaacttcaggaagatgttggtgtactccttgtcagcaatgcagatgggggtcacatagctgttcagcaccaggggctcatccagctccagcagggcaatgtcatggttgtacttgttgatggcagcattgtagttgtggtgggggatgatcctgatcacattcctcttctgctctgtgtgctctgtctcctcaatgttgtgctccccagccaccactgtgatcttcacccctgtctccacacagtgggcagctgtcacaatccacttctcattcacaatgctgcctccacagaaggcatccaccttgccattcagcaccacctgccaggggaactggccaggcttggcatcctctccccccaccaccctggtgaagtcattgaagctctgggtgctctgggtgatgttgtccaggatggtctcagcctctgtgctgttcacatagtccacatcagggaacactgtctcagccctggtcagcttgctggtctggctcacagacactctgccacaggggaagggcacagcaggctcacagctcttctggttctcagccagcctgtagccctctgtgcagctgcacaccaccttgttgtcagcagagttcttgcagaactgctcacatctgccattcttgatgttgcaggtcacatccagctcacagttcttgccctcaaagccaaaggggcaccagcactcatagctgttgatgtcatccttgcagctgcctccattcaggcaggggttgctctcacactggtctccatccacatactgcttccagaactctgtggttctctctgtgttctcaaacacctccctggcctcctcaaagctgcacttctcctccatgcactctctctccaggttgccctgcacaaactcctccagcttgccagagttgtacctcttgggcctgttcaggatcttgttggcattctcatggtccaggaaaactgtggaaacagggagagaaaaaccacacaacatatttaaagattgatgaagacaactaactgtaatatgctgctttttgttcttctcttcactgacctaagagatctaggaacccctagtgatggagttggccactccctctctgcgcgctcgctcgctcactgaggccgcccgggcaaagcccgggcgtcgggcgacctttggtcgcccggcctcagtgagcgagcgagcgcgcagagagggagtggccaa

SEQ ID NO: 81 - DNA, 3570 bp, synthetic construct
  misc_feature 1..3570: note = Synthetic
  misc_feature 1..145: note = ITR
  misc_feature 154..253: note = Splice acceptor
  misc_feature 256..1551: note = F9 CDS #1 Native CpG Removed No Splice F9
  misc_feature 315: note = Cryptic splice donor site mutated
  misc_feature 456: note = Cryptic splice donor site mutated
  misc_feature 873: note = Cryptic splice donor site mutated
  misc_feature 1555..1556: note = CpG removed
  misc_feature 1558..1781: note = bGH pA with CpG sites removed
  misc_feature 1792..1793: note = CpG removed
  misc_feature 1889..2019: note = SV40 pA
  misc_feature 2020..3315: note = F9 CDS #2 (GA F9)
  misc_feature 3318..3417: note = Splice acceptor
  misc_feature 3426..3570: note = ITR
  source 1..3570: mol_type = other DNA
ttggccactccctctctgcgcgctcgctcgctcactgaggccgggcgaccaaaggtcgcccgacgcccgggctttgcccgggcggcctcagtgagcgagcgagcgcgcagagagggagtggccaactccatcactaggggttcctagatctcttaggtcagtgaagagaagaacaaaaagcagcatattacagttagttgtcttcatcaatctttaaatatgttgtgtggtttttctctccctgtttccacagtttttcttgatcatgaaaatgccaacaaaattctgaataggccaaagaggtataattcagggaaattggaagagtttgttcaagggaaccttgagagagaatgtatggaagaaaagtgtagttttgaagaagcaagagaagtttttgaaaacactgaaagaacaactgaattttggaagcagtatgttgatggagatcagtgcgagtccaatccatgtttaaatgggggcagttgcaaggatgacattaattcctatgaatgttggtgtccctttggatttgaaggaaagaactgtgaattagatgtaacatgtaacattaagaatggcagatgtgagcagttttgtaaaaatagtgctgataacaaggtggtttgctcctgtactgagggatatagacttgcagaaaaccagaagtcctgtgaaccagcagtgccatttccatgtggaagagtttctgtttcacaaacttctaagctcaccagagctgagactgtttttcctgatgtggactatgtaaattctactgaagctgaaaccattttggataacatcactcaaagcacccaatcatttaatgacttcactagggttgttggtggagaagatgccaaaccaggacaattcccttggcaggttgttttgaatggtaaagttgatgcattctgtggaggctctattgttaatgaaaaatggattgtaactgctgcccactgtgttgaaactggtgttaaaattacagttgtggcaggtgaacataatattgaggagacagaacatacagagcaaaagagaaatgtgattagaattattcctcaccacaactacaatgcagctattaataagtacaaccatgacattgcccttctggaactggatgaacccttagtgctaaacagctatgttacacctatttgcattgctgacaaggaatacaccaacatcttcctcaaatttggatctggctatgtaagtggctggggaagagtcttccacaaagggagatcagctttagttcttcagtaccttagagttccacttgttgacagagccacatgtcttaggtctacaaagttcaccatctataacaacatgttctgtgctggcttccatgaaggaggtagagattcatgtcaaggagatagtgggggaccccatgttactgaagtggaagggaccagtttcttaactggaattattagctggggtgaagagtgtgcaatgaaaggcaaatatggaatatataccaaggtatccaggtatgtcaactggattaaggaaaaaacaaagctcacttaacctctactgtgccttctagttgccagccatctgttgtttgcccctcccccttgccttccttgaccctggaaggtgccactcccactgtcctttcctaataaaatgaggaaattgcatcacattgtctgagtaggtgtcattctattctggggggtggggtggggcaggacagcaagggggaggattgggaagacaatagcaggcatgctggggatgcagtgggctctatggcttctgaggtggaaagaaccagctggggctctagggggtatccccaaaaaacctcccacacctccccctgaacctgaaacataaaatgaatgcaattgttgttgttaacttgtttattgcagcttataatggttacaaataaagcaatagcatcacaaatttcacaaataaagcatttttttcactgcattctagttgtggtttgtccaaactcatcaatgtatcttatcatgtctgtcaggtgagcttggtcttttctttgatccagttgacatatctggacaccttggtgtagatgccatatttgcccttcatggcacactcttctccccagctgatgatgcctgtcagaaagctggtgccttccacctctgtcacatgagggccaccactatctccctggcaggagtctctgccaccttcatggaacccagcacagaacatgttgttgtagatggtgaacttggtgcttctcagacaggtggctctatccaccaggggcactctcaggtactgcagcaccagggcagaccttcccttgtggaacactctaccccagccagacacatagccagagccaaacttcagaaagatgttggtgtactctttgtcagcaatgcagataggggtcacataggagttcaggaccaggggctcatccagctcaagcagggcaatgtcatggttgtacttgttgatggcagcattgtagttgtggtgagggatgatcctgatgacattcctcttttgctctgtgtgctctgtttcctcaatgttgtgctccccagccaccactgtgatcttgacccctgtttccacacagtgggcagctgtcacaatccacttctcattcacaatggagccaccacagaaggcatccactttgccattcagcaccacttgccaagggaactgtccaggcttggcatcttcccctccaacaactcttgtgaagtcattgaaggactgggtgctctgggtgatgttgtccaggatggtttcagcctctgtggagttcacatagtccacatcagggaacactgtctcagctctggtcagcttgctggtctgggacacagacactctgccacatggaaagggcacagcaggttcacagcttttctggttctcagccagtctgtagccctctgtgcaggagcacacaaccttgttgtcagcagagttcttgcagaactgttcacatctgccattcttgatgttgcaggtcacatccagttcacagttcttgccctcaaagccaaaggggcaccagcactcatagctgttgatgtcatccttgcagctgccaccattcaggcaggggttgctttcacactggtccccatccacatactgcttccagaactctgtggttctctctgtgttctcaaacacttccctggcctcttcaaagctgcacttctcttccatgcattccctttccaggttgccctgcacaaactcttccagcttgccagagttgtacctcttgggcctgttcaggatcttgttggcattctcatggtccaggaaaactgtggaaacagggagagaaaaaccacacaacatatttaaagattgatgaagacaactaactgtaatatgctgctttttgttcttctcttcactgacctaagagatctaggaacccctagtgatggagttggccactccctctctgcgcgctcgctcgctcactgaggccgcccgggcaaagcccgggcgtcgggcgacctttggtcgcccggcctcagtgagcgagcgagcgcgcagagagggagtggccaa

SEQ ID NO: 82 - DNA, 3570 bp, synthetic construct
  misc_feature 1..3570: note = Synthetic
  misc_feature 1..145: note = ITR
  misc_feature 154..253: note = Splice acceptor
  misc_feature 256..1551: note = F9 CDS #1 Native CpG Removed No Splice F9
  misc_feature 315: note = Cryptic splice donor site mutated
  misc_feature 456: note = Cryptic splice donor site mutated
  misc_feature 873: note = Cryptic splice donor site mutated
  misc_feature 1555..1556: note = CpG removed
  misc_feature 1558..1781: note = bGH pA with CpG sites removed
  misc_feature 1792..1793: note = CpG removed
  misc_feature 1889..2019: note = SV40 pA
  misc_feature 2020..3315: note = F9 CDS #2
  misc_feature 3318..3417: note = Splice acceptor
  misc_feature 3426..3570: note = ITR
  source 1..3570: mol_type = other DNA
ttggccactccctctctgcgcgctcgctcgctcactgaggccgggcgaccaaaggtcgcccgacgcccgggctttgcccgggcggcctcagtgagcgagcgagcgcgcagagagggagtggccaactccatcactaggggttcctagatctcttaggtcagtgaagagaagaacaaaaagcagcatattacagttagttgtcttcatcaatctttaaatatgttgtgtggtttttctctccctgtttccacagtttttcttgatcatgaaaatgccaacaaaattctgaataggccaaagaggtataattcagggaaattggaagagtttgttcaagggaaccttgagagagaatgtatggaagaaaagtgtagttttgaagaagcaagagaagtttttgaaaacactgaaagaacaactgaattttggaagcagtatgttgatggagatcagtgcgagtccaatccatgtttaaatgggggcagttgcaaggatgacattaattcctatgaatgttggtgtccctttggatttgaaggaaagaactgtgaattagatgtaacatgtaacattaagaatggcagatgtgagcagttttgtaaaaatagtgctgataacaaggtggtttgctcctgtactgagggatatagacttgcagaaaaccagaagtcctgtgaaccagcagtgccatttccatgtggaagagtttctgtttcacaaacttctaagctcaccagagctgagactgtttttcctgatgtggactatgtaaattctactgaagctgaaaccattttggataacatcactcaaagcacccaatcatttaatgacttcactagggttgttggtggagaagatgccaaaccaggacaattcccttggcaggttgttttgaatggtaaagttgatgcattctgtggaggctctattgttaatgaaaaatggattgtaactgctgcccactgtgttgaaactggtgttaaaattacagttgtggcaggtgaacataatattgaggagacagaacatacagagcaaaagagaaatgtgattagaattattcctcaccacaactacaatgcagctattaataagtacaaccatgacattgcccttctggaactggatgaacccttagtgctaaacagctatgttacacctatttgcattgctgacaaggaatacaccaacatcttcctcaaatttggatctggctatgtaagtggctggggaagagtcttccacaaagggagatcagctttagttcttcagtaccttagagttccacttgttgacagagccacatgtcttaggtctacaaagttcaccatctataacaacatgttctgtgctggcttccatgaaggaggtagagattcatgtcaaggagatagtgggggaccccatgttactgaagtggaagggaccagtttcttaactggaattattagctggggtgaagagtgtgcaatgaaaggcaaatatggaatatataccaaggtatccaggtatgtcaactggattaaggaaaaaacaaagctcacttaacctctactgtgccttctagttgccagccatctgttgtttgcccctcccccttgccttccttgaccctggaaggtgccactcccactgtcctttcctaataaaatgaggaaattgcatcacattgtctgagtaggtgtcattctattctggggggtggggtggggcaggacagcaagggggaggattgggaagacaatagcaggcatgctggggatgcagtgggctctatggcttctgaggtggaaagaaccagctggggctctagggggtatccccaaaaaacctcccacacctccccctgaacctgaaacataaaatgaatgcaattgttgttgttaacttgtttattgcagcttataatggttacaaataaagcaatagcatcacaaatttcacaaataaagcatttttttcactgcattctagttgtggtttgtccaaactcatcaatgtatcttatcatgtctgtcaggtcagtttggttttttctttgatccagttcacatatctggacaccttggtgtagatgccatacttgcccttcatggcacattcctctccccagctgatgatgcctgtcaggaagctggtgccctccacctctgtcacatgtgggcctccagagtctccttggcagctgtctctgcctccctcatggaagccagcacagaacatgttgttgtagatggtgaacttggtgcttctcaggcaggtggctctgtccaccagggggactctcaggtattgcagcaccagggcagacctgcccttgtggaacactctgccccagccagacacatagccagagccaaacttcaggaagatgttggtgtactctttgtctgcaatgcagatgggggtaacatagctgttcagcaccagaggctcatcaagttccagcagggcaatgtcatggttgtacttgttgatggctgcattgtagttgtggtgagggatgatcctgatcacatttctcttctgctctgtgtgctctgtttcttctatgttgtgttcaccagccaccactgtgatcttgacacctgtttccacacagtgggcagctgtcacaatccatttttcattcacaatgctgcccccacagaaggcatccaccttgccattcagcaccacctgccatgggaactggccaggcttggcatcctctcctcccaccactctggtgaagtcattgaagctctgggtgctctgggtgatgttgtccaggatggtctcagcctcagtgctgttcacatagtccacatcagggaacactgtttcagccctggtcagcttggaggtctgggacacagacactctgccacaggggaaagggacagcaggttcacagctcttctggttttcagccagcctgtagccctctgtgcagctgcacaccaccttgttgtctgctgagttcttgcagaactgttcacatctgccattcttgatgttgcaggtgacatccagctcacagttcttgccctcaaagccaaaagggcaccagcactcatagctgttgatgtcatctttgcagctgcctccattcaggcaagggttgctctcacactggtctccatcaacatactgcttccagaactcagtggttctctctgtgttttcaaacacttctctggcttcctcaaagctgcacttctcttccatgcactccctctccaggttgccctgcacaaactcctccagcttgccactgttgtatctcttgggtctgttgaggatcttgttggcattctcatggtccaggaaaactgtggaaacagggagagaaaaaccacacaacatatttaaagattgatgaagacaactaactgtaatatgctgctttttgttcttctcttcactgacctaagagatctaggaacccctagtgatggagttggccactccctctctgcgcgctcgctcgctcactgaggccgcccgggcaaagcccgggcgtcgggcgacctttggtcgcccggcctcagtgagcgagcgagcgcgcagagagggagtggccaa

SEQ ID NO: 83 - DNA, 3570 bp, synthetic construct
  misc_feature 1..3570: note = Synthetic
  source 1..3570: mol_type = other DNA
ttggccactccctctctgcgcgctcgctcgctcactgaggccgggcgaccaaaggtcgcccgacgcccgggctttgcccgggcggcctcagtgagcgagcgagcgcgcagagagggagtggccaactccatcactaggggttcctagatctcttaggtcagtgaagagaagaacaaaaagcagcatattacagttagttgtcttcatcaatctttaaatatgttgtgtggtttttctctccctgtttccacagtttttcttgatcatgaaaatgccaacaaaattctgaataggccaaagaggtataattcagggaaattggaagagtttgttcaagggaaccttgagagagaatgtatggaagaaaagtgtagttttgaagaagcaagagaagtttttgaaaacactgaaagaacaactgaattttggaagcagtatgttgatggagatcagtgcgagtccaatccatgtttaaatgggggcagttgcaaggatgacattaattcctatgaatgttggtgtccctttggatttgaaggaaagaactgtgaattagatgtaacatgtaacattaagaatggcagatgtgagcagttttgtaaaaatagtgctgataacaaggtggtttgctcctgtactgagggatatagacttgcagaaaaccagaagtcctgtgaaccagcagtgccatttccatgtggaagagtttctgtttcacaaacttctaagctcaccagagctgagactgtttttcctgatgtggactatgtaaattctactgaagctgaaaccattttggataacatcactcaaagcacccaatcatttaatgacttcactagggttgttggtggagaagatgccaaaccaggacaattcccttggcaggttgttttgaatggtaaagttgatgcattctgtggaggctctattgttaatgaaaaatggattgtaactgctgcccactgtgttgaaactggtgttaaaattacagttgtggcaggtgaacataatattgaggagacagaacatacagagcaaaagagaaatgtgattagaattattcctcaccacaactacaatgcagctattaataagtacaaccatgacattgcccttctggaactggatgaacccttagtgctaaacagctatgttacacctatttgcattgctgacaaggaatacaccaacatcttcctcaaatttggatctggctatgtaagtggctggggaagagtcttccacaaagggagatcagctttagttcttcagtaccttagagttccacttgttgacagagccacatgtcttaggtctacaaagttcaccatctataacaacatgttctgtgctggcttccatgaaggaggtagagattcatgtcaaggagatagtgggggaccccatgttactgaagtggaagggaccagtttcttaactggaattattagctggggtgaagagtgtgcaatgaaaggcaaatatggaatatataccaaggtatccaggtatgtcaactggattaaggaaaaaacaaagctcacttaacctctactgtgccttctagttgccagccatctgttgtttgcccctcccccttgccttccttgaccctggaaggtgccactcccactgtcctttcctaataaaatgaggaaattgcatcacattgtctgagtaggtgtcattctattctggggggtggggtggggcaggacagcaagggggaggattgggaagacaatagcaggcatgctggggatgcagtgggctctatggcttctgaggtggaaagaaccagctggggctctagggggtatccccaaaaaacctcccacacctccccctgaacctgaaacataaaatgaatgcaattgttgttgttaacttgtttattgcagcttataatggttacaaataaagcaatagcatcacaaatttcacaaataaagcatttttttcactgcattctagttgtggtttgtccaaactcatcaatgtatcttatcatgtctgttaggtgagcttagtcttttcttttatccaattcacgtagcgagagaccttcgtatagatgccatatttccccttcatcgcacattcctccccccaacttattatcccggtcaagaaacttgttccttcgacttcagtgacgtgtggtccacctgaatcaccttggcatgagtcgcgaccgccctcgtgaaacccagcacaaaacatgttattgtaaatcgtaaatttcgtggaccgaagacaggtcgctctatcgaccaacgggacgcgcaaatattgcagaacgagggctgaccgacctttgtggaagacccgcccccacccactcacatatccgctcccaaatttcaagaagatatttgtatattctttatcggctatacaaatcggggtaacataggagttaagtacgagtggctcgtccagctccaggagggctatatcatggttgtacttgtttatagcggcattataattgtgatggggtatgatcctgataacattccttttctgttcagtatgctcagtttcttcaatgttgtgttcgccagccacgaccgtaatcttaacccccgtctcgacacagtgtgcggccgttacaatccacttttcattgactatggagcccccacaaaacgcgtcgacttttccgttgagcaccacctgccatggaaattggccaggtttagcgtcctcgcccccgacaaccctagtaaagtcattaaatgactgtgtggattgtgttatattatcaagaatcgtttcggcttcagtagagttaacgtagtccacatcgggaaaaactgtctcggcccttgtcaactttgatgtctgggacacacttacccgaccgcacgggaagggcaccgccggttcacagctcttttgattctcagcgagccggtagccctcagtgcaactacacacaactttgttgtcggcggaatttttacagaattgctcgcatcgtccatttttaatgttgcaggtgacgtccaactcgcagttttttccttcaaaaccaaaagggcaccaacactcgtaggaatttatatcgtctttacaactccccccattcagacatggattagattcgcattggtccccatcgacatattgcttccagaactcagtggtccgttctgtattctcaaacacctcgcgcgcttcttcaaaactgcatttttcctccatacactctcgctccaagttcccttgcacgaattcttcaagctttcctgagttataccttttaggccggttaagtatcttattcgcgttttcgtggtccagaaaaactgtggaaacagggagagaaaaaccacacaacatatttaaagattgatgaagacaactaactgtaatatgctgctttttgttcttctcttcactgacctaagagatctaggaacccctagtgatggagttggccactccctctctgcgcgctcgctcgctcactgaggccgcccgggcaaagcccgggcgtcgggcgacctttggtcgcccggcctcagtgagcgagcgagcgcgcagagagggagtggccaa

SEQ ID NO: 84 - DNA, 3570 bp, synthetic construct
  misc_feature 1..3570: note = Synthetic
  source 1..3570: mol_type = other DNA
ttggccactccctctctgcgcgctcgctcgctcactgaggccgggcgaccaaaggtcgcccgacgcccgggctttgcccgggcggcctcagtgagcgagcgagcgcgcagagagggagtggccaactccatcactaggggttcctagatctcttaggtcagtgaagagaagaacaaaaagcagcatattacagttagttgtcttcatcaatctttaaatatgttgtgtggtttttctctccctgtttccacagtttttcttgatcatgaaaatgccaacaaaattctgaataggccaaagaggtataattcaggtaaattggaagagtttgttcaagggaaccttgagagagaatgtatggaagaaaagtgtagttttgaagaagcaagagaagtttttgaaaacactgaaagaacaactgaattttggaagcagtatgttgatggagatcagtgtgagtccaatccatgtttaaatgggggcagttgcaaggatgacattaattcctatgaatgttggtgtccctttggatttgaaggaaagaactgtgaattagatgtaacatgtaacattaagaatggcagatgtgagcagttttgtaaaaatagtgctgataacaaggtggtttgctcctgtactgagggatatagacttgcagaaaaccagaagtcctgtgaaccagcagtgccatttccatgtggaagagtttctgtttcacaaacttctaagctcaccagagctgagactgtttttcctgatgtggactatgtaaattctactgaagctgaaaccattttggataacatcactcaaagcacccaatcatttaatgacttcactagggttgttggtggagaagatgccaaaccaggtcaattcccttggcaggttgttttgaatggtaaagttgatgcattctgtggaggctctattgttaatgaaaaatggattgtaactgctgcccactgtgttgaaactggtgttaaaattacagttgtggcaggtgaacataatattgaggagacagaacatacagagcaaaagagaaatgtgattagaattattcctcaccacaactacaatgcagctattaataagtacaaccatgacattgcccttctggaactggatgaacccttagtgctaaacagctatgttacacctatttgcattgctgacaaggaatacaccaacatcttcctcaaatttggatctggctatgtaagtggctggggaagagtcttccacaaagggagatcagctttagttcttcagtaccttagagttccacttgttgacagagccacatgtcttaggtctacaaagttcaccatctataacaacatgttctgtgctggcttccatgaaggaggtagagattcatgtcaaggagatagtgggggaccccatgttactgaagtggaagggaccagtttcttaactggaattattagctggggtgaagagtgtgcaatgaaaggcaaatatggaatatataccaaggtatccaggtatgtcaactggattaaggaaaaaacaaagctcacttaacctctactgtgccttctagttgccagccatctgttgtttgcccctcccccttgccttccttgaccctggaaggtgccactcccactgtcctttcctaataaaatgaggaaattgcatcacattgtctgagtaggtgtcattctattctggggggtggggtggggcaggacagcaagggggaggattgggaagacaatagcaggcatgctggggatgcagtgggctctatggcttctgaggtggaaagaaccagctggggctctagggggtatccccaaaaaacctcccacacctccccctgaacctgaaacataaaatgaatgcaattgttgttgttaacttgtttattgcagcttataatggttacaaataaagcaatagcatcacaaatttcacaaataaagcatttttttcactgcattctagttgtggtttgtccaaactcatcaatgtatcttatcatgtctgttaggtgagcttagtcttttcttttatccaattcacgtagcgagagaccttcgtatagatgccatatttccccttcatcgcacattcctccccccaacttattatcccggtcaagaaacttgttccttcgacttcagtgacgtgtggtccacctgaatcaccttggcatgagtcgcgaccgccctcgtgaaacccagcacaaaacatgttattgtaaatcgtaaatttcgtggaccgaagacaggtcgctctatcgaccaacgggacgcgcaaatattgcagaacgagggctgaccgacctttgtggaagacccgcccccacccactcacatatccgctcccaaatttcaagaagatatttgtatattctttatcggctatacaaatcggggtaacataggagttaagtacgagtggctcgtccagctccaggagggctatatcatggttgtacttgtttatagcggcattataattgtgatggggtatgatcctgataacattccttttctgttcagtatgctcagtttcttcaatgttgtgttcgccagccacgaccgtaatcttaacccccgtctcgacacagtgtgcggccgttacaatccacttttcattgactatggagcccccacaaaacgcgtcgacttttccgttgagcaccacctgccatggaaattggccaggtttagcgtcctcgcccccgacaaccctagtaaagtcattaaatgactgtgtggattgtgttatattatcaagaatcgtttcggcttcagtagagttaacgtagtccacatcgggaaaaactgtctcggcccttgtcaactttgatgtctgggacacacttacccgaccgcacgggaagggcaccgccggttcacagctcttttgattctcagcgagccggtagccctcagtgcaactacacacaactttgttgtcggcggaatttttacagaattgctcgcatcgtccatttttaatgttgcaggtgacgtccaactcgcagttttttccttcaaaaccaaaagggcaccaacactcgtaggaatttatatcgtctttacaactccccccattcagacatggattagattcgcattggtccccatcgacatattgcttccagaactcagtggtccgttctgtattctcaaacacctcgcgcgcttcttcaaaactgcatttttcctccatacactctcgctccaagttcccttgcacgaattcttcaagctttcctgagttataccttttaggccggttaagtatcttattcgcgttttcgtggtccagaaaaactgtggaaacagggagagaaaaaccacacaacatatttaaagattgatgaagacaactaactgtaatatgctgctttttgttcttctcttcactgacctaagagatctaggaacccctagtgatggagttggccactccctctctgcgcgctcgctcgctcactgaggccgcccgggcaaagcccgggcgtcgggcgacctttggtcgcccggcctcagtgagcgagcgagcgcgcagagagggagtggccaa

SEQ ID NO: 85 - DNA, 3570 bp, synthetic construct
  misc_feature 1..3570: note = Synthetic
  source 1..3570: mol_type = other DNA
ttggccactccctctctgcgcgctcgctcgctcactgaggccgggcgaccaaaggtcgcccgacgcccgggctttgcccgggcggcctcagtgagcgagcgagcgcgcagagagggagtggccaactccatcactaggggttcctagatctcttaggtcagtgaagagaagaacaaaaagcagcatattacagttagttgtcttcatcaatctttaaatatgttgtgtggtttttctctccctgtttccacagtttttcttgatcatgaaaacgccaacaaaattctgaatcggccaaagaggtataattcaggtaaattggaagagtttgttcaagggaaccttgagagagaatgtatggaagaaaagtgtagttttgaagaagcacgagaagtttttgaaaacactgaaagaacaactgaattttggaagcagtatgttgatggagatcagtgtgagtccaatccatgtttaaatggcggcagttgcaaggatgacattaattcctatgaatgttggtgtccctttggatttgaaggaaagaactgtgaattagatgtaacatgtaacattaagaatggcagatgcgagcagttttgtaaaaatagtgctgataacaaggtggtttgctcctgtactgagggatatcgacttgcagaaaaccagaagtcctgtgaaccagcagtgccatttccatgtggaagagtttctgtttcacaaacttctaagctcacccgtgctgagactgtttttcctgatgtggactatgtaaattctactgaagctgaaaccattttggataacatcactcaaagcacccaatcatttaatgacttcactcgggttgttggtggagaagatgccaaaccaggtcaattcccttggcaggttgttttgaatggtaaagttgatgcattctgtggaggctctatcgttaatgaaaaatggattgtaactgctgcccactgtgttgaaactggtgttaaaattacagttgtcgcaggtgaacataatattgaggagacagaacatacagagcaaaagcgaaatgtgattcgaattattcctcaccacaactacaatgcagctattaataagtacaaccatgacattgcccttctggaactggacgaacccttagtgctaaacagctacgttacacctatttgcattgctgacaaggaatacacgaacatcttcctcaaatttggatctggctatgtaagtggctggggaagagtcttccacaaagggagatcagctttagttcttcagtaccttagagttccacttgttgaccgagccacatgtcttcgatctacaaagttcaccatctataacaacatgttctgtgctggcttccatgaaggaggtagagattcatgtcaaggagatagtgggggaccccatgttactgaagtggaagggaccagtttcttaactggaattattagctggggtgaagagtgtgcaatgaaaggcaaatatggaatatataccaaggtatcccggtatgtcaactggattaaggaaaaaacaaagctcacttaacctctactgtgccttctagttgccagccatctgttgtttgcccctcccccttgccttccttgaccctggaaggtgccactcccactgtcctttcctaataaaatgaggaaattgcatcacattgtctgagtaggtgtcattctattctggggggtggggtggggcaggacagcaagggggaggattgggaagacaatagcaggcatgctggggatgcagtgggctctatggcttctgaggtggaaagaaccagctggggctctagggggtatccccaaaaaacctcccacacctccccctgaacctgaaacataaaatgaatgcaattgttgttgttaacttgtttattgcagcttataatggttacaaataaagcaatagcatcacaaatttcacaaataaagcatttttttcactgcattctagttgtggtttgtccaaactcatcaatgtatcttatcatgtctgttaggtgagcttagtcttttcttttatccaattcacgtagcgagagaccttcgtatagatgccatatttccccttcatcgcacattcctccccccaacttattatcccggtcaagaaacttgttccttcgacttcagtgacgtgtggtccacctgaatcaccttggcatgagtcgcgaccgccctcgtgaaacccagcacaaaacatgttattgtaaatcgtaaatttcgtggaccgaagacaggtcgctctatcgaccaacgggacgcgcaaatattgcagaacgagggctgaccgacctttgtggaagacccgcccccacccactcacatatccgctcccaaatttcaagaagatatttgtatattctttatcggctatacaaatcggggtaacataggagttaagtacgagtggctcgtccagctccaggagggctatatcatggttgtacttgtttatagcggcattataattgtgatggggtatgatcctgataacattccttttctgttcagtatgctcagtttcttcaatgttgtgttcgccagccacgaccgtaatcttaacccccgtctcgacacagtgtgcggccgttacaatccacttttcattgactatggagcccccacaaaacgcgtcgacttttccgttgagcaccacctgccatggaaattggccaggtttagcgtcctcgcccccgacaaccctagtaaagtcattaaatgactgtgtggattgtgttatattatcaagaatcgtttcggcttcagtagagttaacgtagtccacatcgggaaaaactgtctcggcccttgtcaactttgatgtctgggacacacttacccgaccgcacgggaagggcaccgccggttcacagctcttttgattctcagcgagccggtagccctcagtgcaactacacacaactttgttgtcggcggaatttttacagaattgctcgcatcgtccatttttaatgttgcaggtgacgtccaactcgcagttttttccttcaaaaccaaaagggcaccaacactcgtaggaatttatatcgtctttacaactccccccattcagacatggattagattcgcattggtccccatcgacatattgcttccagaactcagtggtccgttctgtattctcaaacacctcgcgcgcttcttcaaaactgcatttttcctccatacactctcgctccaagttcccttgcacgaattcttcaagctttcctgagttataccttttaggccggttaagtatcttattcgcgttttcgtggtccagaaaaactgtggaaacagggagagaaaaaccacacaacatatttaaagattgatgaagacaactaactgtaatatgctgctttttgttcttctcttcactgacctaagagatctaggaacccctagtgatggagttggccactccctctctgcgcgctcgctcgctcactgaggccgcccgggcaaagcccgggcgtcgggcgacctttggtcgcccggcctcagtgagcgagcgagcgcgcagagagggagtggccaa

SEQ ID NO: 86 - DNA, 3570 bp, synthetic construct
  misc_feature 1..3570: note = Synthetic
  source 1..3570: mol_type = other DNA
ttggccactccctctctgcgcgctcgctcgctcactgaggccgggcgaccaaaggtcgcccgacgcccgggctttgcccgggcggcctcagtgagcgagcgagcgcgcagagagggagtggccaactccatcactaggggttcctagatctcttaggtcagtgaagagaagaacaaaaagcagcatattacagttagttgtcttcatcaatctttaaatatgttgtgtggtttttctctccctgtttccacagtttttcttgatcatgaaaacgccaacaaaattctgaatcggccaaagaggtataattcagggaaattggaagagtttgttcaagggaaccttgagagagaatgtatggaagaaaagtgtagttttgaagaagcacgagaagtttttgaaaacactgaaagaacaactgaattttggaagcagtatgttgatggagatcagtgcgagtccaatccatgtttaaatggcggcagttgcaaggatgacattaattcctatgaatgttggtgtccctttggatttgaaggaaagaactgtgaattagatgtaacatgtaacattaagaatggcagatgcgagcagttttgtaaaaatagtgctgataacaaggtggtttgctcctgtactgagggatatcgacttgcagaaaaccagaagtcctgtgaaccagcagtgccatttccatgtggaagagtttctgtttcacaaacttctaagctcacccgtgctgagactgtttttcctgatgtggactatgtaaattctactgaagctgaaaccattttggataacatcactcaaagcacccaatcatttaatgacttcactcgggttgttggtggagaagatgccaaaccaggacaattcccttggcaggttgttttgaatggtaaagttgatgcattctgtggaggctctatcgttaatgaaaaatggattgtaactgctgcccactgtgttgaaactggtgttaaaattacagttgtcgcaggtgaacataatattgaggagacagaacatacagagcaaaagcgaaatgtgattcgaattattcctcaccacaactacaatgcagctattaataagtacaaccatgacattgcccttctggaactggacgaacccttagtgctaaacagctacgttacacctatttgcattgctgacaaggaatacacgaacatcttcctcaaatttggatctggctatgtaagtggctggggaagagtcttccacaaagggagatcagctttagttcttcagtaccttagagttccacttgttgaccgagccacatgtcttcgatctacaaagttcaccatctataacaacatgttctgtgctggcttccatgaaggaggtagagattcatgtcaaggagatagtgggggaccccatgttactgaagtggaagggaccagtttcttaactggaattattagctggggtgaagagtgtgcaatgaaaggcaaatatggaatatataccaaggtatcccggtatgtcaactggattaaggaaaaaacaaagctcacttaacctcgactgtgccttctagttgccagccatctgttgtttgcccctcccccgtgccttccttgaccctggaaggtgccactcccactgtcctttcctaataaaatgaggaaattgcatcgcattgtctgagtaggtgtcattctattctggggggtggggtggggcaggacagcaagggggaggattgggaagacaatagcaggcatgctggggatgcggtgggctctatggcttctgaggcggaaagaaccagctggggctctagggggtatccccaaaaaacctcccacacctccccctgaacctgaaacataaaatgaatgcaattgttgttgttaacttgtttattgcagcttataatggttacaaataaagcaatagcatcacaaatttcacaaataaagcatttttttcactgcattctagttgtggtttgtccaaactcatcaatgtatcttatcatgtctgttaggtgagcttagtcttttcttttatccaattcacgtagcgagagaccttcgtatagatgccatatttccccttcatcgcacattcctccccccaacttattatcccggtcaagaaacttgttccttcgacttcagtgacgtgtggtccacctgaatcaccttggcatgagtcgcgaccgccctcgtgaaacccagcacaaaacatgttattgtaaatcgtaaatttcgtggaccgaagacaggtcgctctatcgaccaacgggacgcgcaaatattgcagaacgagggctgatcgacctttgtggaagacccgcccccacccactcacatatccgctcccaaatttcaagaagatatttgtatattctttatcggctatacaaatcggggtaacataggagttaagtacgagtggctcgtccagctccaggagggctatatcatggttgtacttgtttatagcggcattataattgtgatggggtatgatcctgataacattccttttctgttcagtatgctcagtttcttcaatgttgtgttcgccagccacgaccgtaatcttaacccccgtctcgacacagtgtgcggccgttacaatccacttttcattgactatggagcccccacaaaacgcgtcgacttttccgttgagcaccacctgccatggaaattggccaggtttagcgtcctcgcccccgacaaccctagtaaagtcattaaatgactgtgtggattgtgttatattatcaagaatcgtttcggcttcagtagagttaacgtagtccacatcgggaaaaactgtctcggcccttgtcaactttgatgtctgggacacacttacccgaccgcacgggaagggcaccgccggttcacagctcttttgattctcagcgagccggtagccctcagtgcaactacacacaactttgttgtcggcggaatttttacagaattgctcgcatcgtccatttttaatgttgcaggtgacgtccaactcgcagttttttccttcaaaaccaaaagggcaccaacactcgtaggaatttatatcgtctttacaactccccccattcagacatggattagattcgcattggtccccatcgacatattgcttccagaactcagtggtccgttctgtattctcaaacacctcgcgcgcttcttcaaaactgcatttttcctccatacactctcgctccaagttcccttgcacgaattcttcaagctttcctgagttataccttttaggccggttaagtatcttattcgcgttttcgtggtccagaaaaactgtggaaacagggagagaaaaaccacacaacatatttaaagattgatgaagacaactaactgtaatatgctgctttttgttcttctcttcactgacctaagagatctaggaacccctagtgatggagttggccactccctctctgcgcgctcgctcgctcactgaggccgcccgggcaaagcccgggcgtcgggcgacctttggtcgcccggcctcagtgagcgagcgagcgcgcagagagggagtggccaa

SEQ ID NO: 87 - DNA, 3570 bp, synthetic construct
  misc_feature 1..3570: note = Synthetic
  source 1..3570: mol_type = other DNA
ttggccactccctctctgcgcgctcgctcgctcactgaggccgggcgaccaaaggtcgcccgacgcccgggctttgcccgggcggcctcagtgagcgagcgagcgcgcagagagggagtggccaactccatcactaggggttcctagatctcttaggtcagtgaagagaagaacaaaaagcagcatattacagttagttgtcttcatcaatctttaaatatgttgtgtggtttttctctccctgtttccacagtttttcttgatcatgaaaacgccaacaaaattctgaatcggccaaagaggtataattcaggtaaattggaagagtttgttcaagggaaccttgagagagaatgtatggaagaaaagtgtagttttgaagaagcacgagaagtttttgaaaacactgaaagaacaactgaattttggaagcagtatgttgatggagatcagtgtgagtccaatccatgtttaaatggcggcagttgcaaggatgacattaattcctatgaatgttggtgtccctttggatttgaaggaaagaactgtgaattagatgtaacatgtaacattaagaatggcagatgcgagcagttttgtaaaaatagtgctgataacaaggtggtttgctcctgtactgagggatatcgacttgcagaaaaccagaagtcctgtgaaccagcagtgccatttccatgtggaagagtttctgtttcacaaacttctaagctcacccgtgctgagactgtttttcctgatgtggactatgtaaattctactgaagctgaaaccattttggataacatcactcaaagcacccaatcatttaatgacttcactcgggttgttggtggagaagatgccaaaccaggtcaattcccttggcaggttgttttgaatggtaaagttgatgcattctgtggaggctctatcgttaatgaaaaatggattgtaactgctgcccactgtgttgaaactggtgttaaaattacagttgtcgcaggtgaacataatattgaggagacagaacatacagagcaaaagcgaaatgtgattcgaattattcctcaccacaactacaatgcagctattaataagtacaaccatgacattgcccttctggaactggacgaacccttagtgctaaacagctacgttacacctatttgcattgctgacaaggaatacacgaacatcttcctcaaatttggatctggctatgtaagtggctggggaagagtcttccacaaagggagatcagctttagttcttcagtaccttagagttccacttgttgaccgagccacatgtcttcgatctacaaagttcaccatctataacaacatgttctgtgctggcttccatgaaggaggtagagattcatgtcaaggagatagtgggggaccccatgttactgaagtggaagggaccagtttcttaactggaattattagctggggtgaagagtgtgcaatgaaaggcaaatatggaatatataccaaggtatcccggtatgtcaactggattaaggaaaaaacaaagctcacttaacctcgactgtgccttctagttgccagccatctgttgtttgcccctcccccgtgccttccttgaccctggaaggtgccactcccactgtcctttcctaataaaatgaggaaattgcatcgcattgtctgagtaggtgtcattctattctggggggtggggtggggcaggacagcaagggggaggattgggaagacaatagcaggcatgctggggatgcggtgggctctatggcttctgaggcggaaagaaccagctggggctctagggggtatccccaaaaaacctcccacacctccccctgaacctgaaacataaaatgaatgcaattgttgttgttaacttgtttattgcagcttataatggttacaaataaagcaatagcatcacaaatttcacaaataaagcatttttttcactgcattctagttgtggtttgtccaaactcatcaatgtatcttatcatgtctgtcaggtcagtttggttttttctttgatccagttcacatatctggacaccttggtgtagatgccatacttgcccttcatggcacattcctctccccagctgatgatgcctgtcaggaagctggtgccctccacctctgtcacgtgtgggcctccagagtctccttggcagctgtctctgcctccctcatggaagccagcacagaacatgttgttgtagatggtgaacttggtgcttctcaggcaggtggctctgtccaccagggggactctcaggtattgcagcaccagggcagacctgcccttgtggaacactctgccccagccagacacgtagccagagccaaacttcaggaagatgttggtgtactctttgtctgcaatgcagatgggggtaacatagctgttcagcaccagaggctcatcaagttccagcagggcaatgtcatggttgtacttgttgatggctgcattgtagttgtggtgagggatgatcctgatcacatttctcttctgctctgtgtgctctgtttcttctatgttgtgttcaccagccaccactgtgatcttgacacctgtttccacacagtgggcagctgtcacaatccatttttcattcacaatgctgcccccacagaaggcatccaccttgccattcagcaccacctgccatgggaactggccaggcttggcatcctctcctcccaccactctggtgaagtcattgaagctctgggtgctctgggtgatgttgtccaggatggtctcagcctcagtgctgttcacatagtccacatcagggaacactgtttcagccctggtcagcttggaggtctgggacacagacactctgccacaggggaaagggacagcaggttcacagctcttctggttttcagccagcctgtagccctctgtgcagctgcacaccaccttgttgtctgctgagttcttgcagaactgttcacatctgccattcttgatgttgcaggtgacatccagctcacagttcttgccctcaaagccaaaagggcaccagcactcatagctgttgatgtcatctttgcagctgcctccattcaggcaagggttgctctcacactggtctccatcaacgtactgcttccagaactcagtggttctctctgtgttttcaaacacttctctggcttcctcaaagctgcacttctcttccatgcactccctctccaggttgccctgcacaaactcctccagcttgccactgttgtatctcttgggtctgttgaggatcttgttggcattctcatggtccaggaaaactgtggaaacagggagagaaaaaccacacaacatatttaaagattgatgaagacaactaactgtaatatgctgctttttgttcttctcttcactgacctaagagatctaggaacccctagtgatggagttggccactccctctctgcgcgctcgctcgctcactgaggccgcccgggcaaagcccgggcgtcgggcgacctttggtcgcccggcctcagtgagcgagcgagcgcgcagagagggagtggccaa

SEQ ID NO: 88 - DNA, 3570 bp, synthetic construct
  misc_feature 1..3570: note = Synthetic
  source 1..3570: mol_type = other DNA
ttggccactccctctctgcgcgctcgctcgctcactgaggccgggcgaccaaaggtcgcccgacgcccgggctttgcccgggcggcctcagtgagcgagcgagcgcgcagagagggagtggccaactccatcactaggggttcctagatctcttaggtcagtgaagagaagaacaaaaagcagcatattacagttagttgtcttcatcaatctttaaatatgttgtgtggtttttctctccctgtttccacagtttttcttgatcatgaaaacgccaacaaaattctgaatcggccaaagaggtataattcaggtaaattggaagagtttgttcaagggaaccttgagagagaatgtatggaagaaaagtgtagttttgaagaagcacgagaagtttttgaaaacactgaaagaacaactgaattttggaagcagtatgttgatggagatcagtgtgagtccaatccatgtttaaatggcggcagttgcaaggatgacattaattcctatgaatgttggtgtccctttggatttgaaggaaagaactgtgaattagatgtaacatgtaacattaagaatggcagatgcgagcagttttgtaaaaatagtgctgataacaaggtggtttgctcctgtactgagggatatcgacttgcagaaaaccagaagtcctgtgaaccagcagtgccatttccatgtggaagagtttctgtttcacaaacttctaagctcacccgtgctgagactgtttttcctgatgtggactatgtaaattctactgaagctgaaaccattttggataacatcactcaaagcacccaatcatttaatgacttcactcgggttgttggtggagaagatgccaaaccaggtcaattcccttggcaggttgttttgaatggtaaagttgatgcattctgtggaggctctatcgttaatgaaaaatggattgtaactgctgcccactgtgttgaaactggtgttaaaattacagttgtcgcaggtgaacataatattgaggagacagaacatacagagcaaaagcgaaatgtgattcgaattattcctcaccacaactacaatgcagctattaataagtacaaccatgacattgcccttctggaactggacgaacccttagtgctaaacagctacgttacacctatttgcattgctgacaaggaatacacgaacatcttcctcaaatttggatctggctatgtaagtggctggggaagagtcttccacaaagggagatcagctttagttcttcagtaccttagagttccacttgttgaccgagccacatgtcttcgatctacaaagttcaccatctataacaacatgttctgtgctggcttccatgaaggaggtagagattcatgtcaaggagatagtgggggaccccatgttactgaagtggaagggaccagtttcttaactggaattattagctggggtgaagagtgtgcaatgaaaggcaaatatggaatatataccaaggtatcccggtatgtcaactggattaaggaaaaaacaaagctcacttaacctcgactgtgccttctagttgccagccatctgttgtttgcccctcccccgtgccttccttgaccctggaaggtgccactcccactgtcctttcctaataaaatgaggaaattgcatcgcattgtctgagtaggtgtcattctattctggggggtggggtggggcaggacagcaagggggaggattgggaagacaatagcaggcatgctggggatgcggtgggctctatggcttctgaggcggaaagaaccagctggggctctagggggtatccccaaaaaacctcccacacctccccctgaacctgaaacataaaatgaatgcaattgttgttgttaacttgtttattgcagcttataatggttacaaataaagcaatagcatcacaaatttcacaaataaagcatttttttcactgcattctagttgtggtttgtccaaactcatcaatgtatcttatcatgtctgtcaggtcagcttggttttctctttgatccagttcacatatctgctaaccttggtgtagatgccatacttgcccttcatggcacactcttccccccagctgatgatgcctgtcaggaagctggtgccctccacctctgtcacatgtgggcctccagagtctccctggcagctgtctctgcctccctcatggaagccagcacagaacatgttgttgtagatggtgaacttggtgcttctcaggcaggtggccctgtccaccagggggactctcaggtattgcagtaccagggcagacctgcccttgtggaacactctgccccagccagacacatagccactgccaaacttgaggaagatgttggtgtactccttgtcagcaatgcagatgggggtaacatagctgttcagcaccagaggctcatcaagttccagcagggcaatgtcatggttgtacttgttgatggctgcattgtagttgtggtgagggatgatcctgatcacatttctcttctgctctgtgtgctctgtttcttctatgttgtgctctccagccaccactgtgattttgacacctgtctccacacagtgggcagctgtcacaatccatttctcattcacaatgctgcctccacagaaggcatccactttgccattcagcaccacctgccatgggaactggccaggcttggcatcctctccacccaccaccctggtgaagtcattgaaggactgggtgctctgggtgatgttgtccaggatggtttcagcctctgtgctgttcacatagtccacatcagggaacacagtctcagccctggtcagcttgctggtctgggacacagacactctgccacaggggaaagggacagcaggttcacaggacttctggttttctgccagcctgtagccctctgtgcagctgcacaccaccttgttgtcagcagagttcttgcagaactgttcacatctgccattcttgatgttgcaggtgacatccagctcacagtttttgccttcaaagccaaaagggcaccagcattcatagctgttgatgtcatccttgcagctgcctccattcaggcaagggttgctctcacactggtctccatccacatactgcttccagaactcagtggttctctctgtgttttcaaacacttccctggcttcttcaaagctgcacttttcttccatgcactctctctccaggttgccttgcacaaactcctccagcttgccagagttgtatctcttgggtctgttcaggatcttgttggcattctcatggtccaggaaaactgtggaaacagggagagaaaaaccacacaacatatttaaagattgatgaagacaactaactgtaatatgctgctttttgttcttctcttcactgacctaagagatctaggaacccctagtgatggagttggccactccctctctgcgcgctcgctcgctcactgaggccgcccgggcaaagcccgggcgtcgggcgacctttggtcgcccggcctcagtgagcgagcgagcgcgcagagagggagtggccaa

SEQ ID NO: 89 - DNA, 3570 bp, synthetic construct
  misc_feature 1..3570: note = Synthetic
  source 1..3570: mol_type = other DNA
ttggccactccctctctgcgcgctcgctcgctcactgaggccgggcgaccaaaggtcgcccgacgcccgggctttgcccgggcggcctcagtgagcgagcgagcgcgcagagagggagtggccaactccatcactaggggttcctagatctcttaggtcagtgaagagaagaacaaaaagcagcatattacagttagttgtcttcatcaatctttaaatatgttgtgtggtttttctctccctgtttccacagtttttcttgatcatgaaaacgccaacaaaattctgaatcggccaaagaggtataattcaggtaaattggaagagtttgttcaagggaaccttgagagagaatgtatggaagaaaagtgtagttttgaagaagcacgagaagtttttgaaaacactgaaagaacaactgaattttggaagcagtatgttgatggagatcagtgtgagtccaatccatgtttaaatggcggcagttgcaaggatgacattaattcctatgaatgttggtgtccctttggatttgaaggaaagaactgtgaattagatgtaacatgtaacattaagaatggcagatgcgagcagttttgtaaaaatagtgctgataacaaggtggtttgctcctgtactgagggatatcgacttgcagaaaaccagaagtcctgtgaaccagcagtgccatttccatgtggaagagtttctgtttcacaaacttctaagctcacccgtgctgagactgtttttcctgatgtggactatgtaaattctactgaagctgaaaccattttggataacatcactcaaagcacccaatcatttaatgacttcactcgggttgttggtggagaagatgccaaaccaggtcaattcccttggcaggttgttttgaatggtaaagttgatgcattctgtggaggctctatcgttaatgaaaaatggattgtaactgctgcccactgtgttgaaactggtgttaaaattacagttgtcgcaggtgaacataatattgaggagacagaacatacagagcaaaagcgaaatgtgattcgaattattcctcaccacaactacaatgcagctattaataagtacaaccatgacattgcccttctggaactggacgaacccttagtgctaaacagctacgttacacctatttgcattgctgacaaggaatacacgaacatcttcctcaaatttggatctggctatgtaagtggctggggaagagtcttccacaaagggagatcagctttagttcttcagtaccttagagttccacttgttgaccgagccacatgtcttcgatctacaaagttcaccatctataacaacatgttctgtgctggcttccatgaaggaggtagagattcatgtcaaggagatagtgggggaccccatgttactgaagtggaagggaccagtttcttaactggaattattagctggggtgaagagtgtgcaatgaaaggcaaatatggaatatataccaaggtatcccggtatgtcaactggattaaggaaaaaacaaagctcacttaacctcgactgtgccttctagttgccagccatctgttgtttgcccctcccccgtgccttccttgaccctggaaggtgccactcccactgtcctttcctaataaaatgaggaaattgcatcgcattgtctgagtaggtgtcattctattctggggggtggggtggggcaggacagcaagggggaggattgggaagacaatagcaggcatgctggggatgcggtgggctctatggcttctgaggcggaaagaaccagctggggctctagggggtatccccaaaaaacctcccacacctccccctgaacctgaaacataaaatgaatgcaattgttgttgttaacttgtttattgcagcttataatggttacaaataaagcaatagcatcacaaatttcacaaataaagcatttttttcactgcattctagttgtggtttgtccaaactcatcaatgtatcttatcatgtctgtcaggtcagcttggttttctctttgatccagttcacatatctgctaaccttggtgtagatgccatacttgcccttcatggcacactcttccccccagctgatgatgcctgtcaggaagctggtgccctccacctctgtcacgtgtgggcctccagagtctccctggcagctgtctctgcctccctcatggaagccggcacagaacatgttgttgtagatggtgaacttggtgcttctcaggcaggtggccctgtccaccagggggactctcaggtattgcagtaccagggcagacctgcccttgtggaacactctgccccagccagacacatagccactgccaaacttgaggaagatgttggtgtactccttgtcagcaatgcagatgggggtaacatagctgttcagcaccagaggctcatcaagttccagcagggcaatgtcgtggttgtacttgttgatggctgcattgtagttgtggtgagggatgatccggatcacatttctcttctgctctgtgtgctctgtttcttctatgttgtgctctccagccaccactgtgattttgacacctgtctccacacagtgggcggctgtcacaatccatttctcattcacaatgctgcctccacagaaggcatccactttgccattcagcaccacctgccatgggaactggccaggcttggcatcctctccacccaccacccgggtgaagtcattgaaggactgggtgctctgggtgatgttgtccaggatggtttcagcctctgtgctgttcacgtagtccacatcagggaacacagtctcagccctggtcagcttgctggtctgggacacagacactctgccacaggggaaagggacagcaggttcacaggacttctggttttctgccagcctgtagccctctgtgcagctgcacaccaccttgttgtcagcagagttcttgcagaactgttcacatctgccattcttgatgttgcaggtgacatccagctcacagtttttgccttcaaagccaaaagggcaccagcattcgtagctgttgatgtcatccttgcagctgcctccattcaggcaagggttgctctcacactggtctccatccacgtactgcttccagaactcagtggttctctctgtgttttcaaacacttcccgggcttcttcaaagctgcacttttcttccatgcactctctctccaggttgccttgcacaaactcctccagcttgccagagttgtatctcttgggtctgttcaggatcttgttggcattctcatggtccaggaaaactgtggaaacagggagagaaaaaccacacaacatatttaaagattgatgaagacaactaactgtaatatgctgctttttgttcttctcttcactgacctaagagatctaggaacccctagtgatggagttggccactccctctctgcgcgctcgctcgctcactgaggccgcccgggcaaagcccgggcgtcgggcgacctttggtcgcccggcctcagtgagcgagcgagcgcgcagagagggagtggccaa

SEQ ID NO: 90 - DNA, 3570 bp, synthetic construct
  misc_feature 1..3570: note = Synthetic
  source 1..3570: mol_type = other DNA
ttggccactccctctctgcgcgctcgctcgctcactgaggccgggcgaccaaaggtcgcccgacgcccgggctttgcccgggcggcctcagtgagcgagcgagcgcgcagagagggagtggccaactccatcactaggggttcctagatctcttaggtcagtgaagagaagaacaaaaagcagcatattacagttagttgtcttcatcaatctttaaatatgttgtgtggtttttctctccctgtttccacagtttttcttgatcatgaaaacgccaacaaaattctgaatcggccaaagaggtataattcaggtaaattggaagagtttgttcaagggaaccttgagagagaatgtatggaagaaaagtgtagttttgaagaagcacgagaagtttttgaaaacactgaaagaacaactgaattttggaagcagtatgttgatggagatcagtgtgagtccaatccatgtttaaatggcggcagttgcaaggatgacattaattcctatgaatgttggtgtccctttggatttgaaggaaagaactgtgaattagatgtaacatgtaacattaagaatggcagatgcgagcagttttgtaaaaatagtgctgataacaaggtggtttgctcctgtactgagggatatcgacttgcagaaaaccagaagtcctgtgaaccagcagtgccatttccatgtggaagagtttctgtttcacaaacttctaagctcacccgtgctgagactgtttttcctgatgtggactatgtaaattctactgaagctgaaaccattttggataacatcactcaaagcacccaatcatttaatgacttcactcgggttgttggtggagaagatgccaaaccaggtcaattcccttggcaggttgttttgaatggtaaagttgatgcattctgtggaggctctatcgttaatgaaaaatggattgtaactgctgcccactgtgttgaaactggtgttaaaattacagttgtcgcaggtgaacataatattgaggagacagaacatacagagcaaaagcgaaatgtgattcgaattattcctcaccacaactacaatgcagctattaataagtacaaccatgacattgcccttctggaactggacgaacccttagtgctaaacagctacgttacacctatttgcattgctgacaaggaatacacgaacatcttcctcaaatttggatctggctatgtaagtggctggggaagagtcttccacaaagggagatcagctttagttcttcagtaccttagagttccacttgttgaccgagccacatgtcttcgatctacaaagttcaccatctataacaacatgttctgtgctggcttccatgaaggaggtagagattcatgtcaaggagatagtgggggaccccatgttactgaagtggaagggaccagtttcttaactggaattattagctggggtgaagagtgtgcaatgaaaggcaaatatggaatatataccaaggtatcccggtatgtcaactggattaaggaaaaaacaaagctcacttaacctcgactgtgccttctagttgccagccatctgttgtttgcccctcccccgtgccttccttgaccctggaaggtgccactcccactgtcctttcctaataaaatgaggaaattgcatcgcattgtctgagtaggtgtcattctattctggggggtggggtggggcaggacagcaagggggaggattgggaagacaatagcaggcatgctggggatgcggtgggctctatggcttctgaggcggaaagaaccagctggggctctagggggtatccccaaaaaacctcccacacctccccctgaacctgaaacataaaatgaatgcaattgttgttgttaacttgtttattgcagcttataatggttacaaataaagcaatagcatcacaaatttcacaaataaagcatttttttcactgcattctagttgtggtttgtccaaactcatcaatgtatcttatcatgtctgtcaggtcagcttggttttctctttgatccagttgacatatctgctcaccttggtgtagatgccatacttgcccttcatggcacactcttccccccagctgatgatgcctgtcaggaagctggtgccctccacctctgtcacatgtgggcctccagagtctccctggcagctgtctctgcctccctcatggaagccagcacagaacatgttgttgtagatggtgaacttggtgcttctcaggcaggtggctctgtccaccagggggaccctcaggtattgcagcaccagggcagacctgcccttgtggaacactctgccccagccagacacatagccagagccaaacttcaggaagatgttggtgtactccttgtcagcaatgcagatgggggtaacatagctgttcagcaccagaggctcatcaagttccagcagggcaatgtcatggttgtacttgttgatggcagcattgtagttgtggtgagggatgattctgatcacattccttttctgctctgtgtgctctgtttcctcaatgttgtgctctccagccaccactgtgatcttgacacctgtctccacacagtgggcagctgtcacaatccacttttcattcacaatgctgcctccacagaaggcatccactttgccattgagcaccacctgccatgggaactggccaggcttggcatcctctccacccaccaccctggtgaagtcattgaaggactgggtgctctgggtgatgttgtccaggatggtttcagcttctgtgctgttcacatagtccacatcagggaacactgtctcagccctggtcagtttgctggtctggctcactgacactctgccacaggggaaaggcacagcaggttcacaggacttctggttttctgccagcctgtagccctctgtgcagctgcacaccaccttgttgtcagcagagttcttgcagaactgttcacatctgccatttttgatgttgcaggtgacatccagctcacagttcttgccttcaaagccaaaagggcaccagcattcatagctgttgatgtcatccttgcaggagcctccattcaggcaagggttgctctcacactggtctccatcaacatactgcttccagaactcagtggttctttctgtgttctcaaacacttccctggcttcctcaaagctgcacttctcttccatgcactccctctccaggttgccttgcacaaattcctccagcttgccactgttgtatctcttgggtctgttcaggatcttgttggcattctcatggtccaggaaaactgtggaaacagggagagaaaaaccacacaacatatttaaagattgatgaagacaactaactgtaatatgctgctttttgttcttctcttcactgacctaagagatctaggaacccctagtgatggagttggccactccctctctgcgcgctcgctcgctcactgaggccgcccgggcaaagcccgggcgtcgggcgacctttggtcgcccggcctcagtgagcgagcgagcgcgcagagagggagtggccaa

SEQ ID NO: 91 - DNA, 3570 bp, synthetic construct
  misc_feature 1..3570: note = Synthetic
  source 1..3570: mol_type = other DNA
ttggccactccctctctgcgcgctcgctcgctcactgaggccgggcgaccaaaggtcgcccgacgcccgggctttgcccgggcggcctcagtgagcgagcgagcgcgcagagagggagtggccaactccatcactaggggttcctagatctcttaggtcagtgaagagaagaacaaaaagcagcatattacagttagttgtcttcatcaatctttaaatatgttgtgtggtttttctctccctgtttccacagtttttcttgatcatgaaaacgccaacaaaattctgaatcggccaaagaggtataattcaggtaaattggaagagtttgttcaagggaaccttgagagagaatgtatggaagaaaagtgtagttttgaagaagcacgagaagtttttgaaaacactgaaagaacaactgaattttggaagcagtatgttgatggagatcagtgtgagtccaatccatgtttaaatggcggcagttgcaaggatgacattaattcctatgaatgttggtgtccctttggatttgaaggaaagaactgtgaattagatgtaacatgtaacattaagaatggcagatgcgagcagttttgtaaaaatagtgctgataacaaggtggtttgctcctgtactgagggatatcgacttgcagaaaaccagaagtcctgtgaaccagcagtgccatttccatgtggaagagtttctgtttcacaaacttctaagctcacccgtgctgagactgtttttcctgatgtggactatgtaaattctactgaagctgaaaccattttggataacatcactcaaagcacccaatcatttaatgacttcactcgggttgttggtggagaagatgccaaaccaggtcaattcccttggcaggttgttttgaatggtaaagttgatgcattctgtggaggctctatcgttaatgaaaaatggattgtaactgctgcccactgtgttgaaactggtgttaaaattacagttgtcgcaggtgaacataatattgaggagacagaacatacagagcaaaagcgaaatgtgattcgaattattcctcaccacaactacaatgcagctattaataagtacaaccatgacattgcccttctggaactggacgaacccttagtgctaaacagctacgttacacctatttgcattgctgacaaggaatacacgaacatcttcctcaaatttggatctggctatgtaagtggctggggaagagtcttccacaaagggagatcagctttagttcttcagtaccttagagttccacttgttgaccgagccacatgtcttcgatctacaaagttcaccatctataacaacatgttctgtgctggcttccatgaaggaggtagagattcatgtcaaggagatagtgggggaccccatgttactgaagtggaagggaccagtttcttaactggaattattagctggggtgaagagtgtgcaatgaaaggcaaatatggaatatataccaaggtatcccggtatgtcaactggattaaggaaaaaacaaagctcacttaacctcgactgtgccttctagttgccagccatctgttgtttgcccctcccccgtgccttccttgaccctggaaggtgccactcccactgtcctttcctaataaaatgaggaaattgcatcgcattgtctgagtaggtgtcattctattctggggggtggggtggggcaggacagcaagggggaggattgggaagacaatagcaggcatgctggggatgcggtgggctctatggcttctgaggcggaaagaaccagctggggctctagggggtatccccaaaaaacctcccacacctccccctgaacctgaaacataaaatgaatgcaattgttgttgttaacttgtttattgcagcttataatggttacaaataaagcaatagcatcacaaatttcacaaataaagcatttttttcactgcattctagttgtggtttgtccaaactcatcaatgtatcttatcatgtctgtcaggtcagcttggttttctctttgatccagttgacatatctgctcaccttggtgtagatgccgtacttgcccttcatggcacactcttccccccagctgatgatgcctgtcaggaagctggtgccctccacctctgtcacgtgtgggcctccagagtctccctggcagctgtctctgcctccctcatggaagccggcacagaacatgttgttgtagatggtgaacttggtgcttctcaggcaggtggctctgtccaccagggggacccgcaggtattgcagcaccagggcagacctgcccttgtggaacactctgccccagccagacacgtagccagagccaaacttcaggaagatgttggtgtactccttgtcggcaatgcagatgggggtaacatagctgttcagcaccagaggctcatcaagttccagcagggcaatgtcgtggttgtacttgttgatggcagcattgtagttgtggtgagggatgattctgatcacattccgtttctgctctgtgtgctctgtttcctcgatgttgtgctctccagccaccactgtgatcttgacacctgtctccacacagtgggcggctgtcacgatccacttttcattcacaatgctgcctccacagaaggcatccactttgccattgagcaccacctgccatgggaactggccaggcttggcatcctctccacccaccacccgggtgaagtcattgaaggactgggtgctctgggtgatgttgtccaggatggtttcagcttctgtgctgttcacgtagtccacatcagggaacactgtctcagcccgggtcagtttgctggtctggctcactgacactctgccacaggggaaaggcacggcaggttcacaggacttctggttttctgccagcctgtagccctctgtgcagctgcacaccaccttgttgtcagcagagttcttgcagaactgttcacatctgccatttttgatgttgcaggtgacatccagctcacagttcttgccttcaaagccaaaagggcaccagcattcgtagctgttgatgtcatccttgcaggagcctccattcaggcaagggttgctctcgcactggtctccatcaacgtactgcttccagaactcagtggttctttctgtgttctcgaacacttcccgggcttcctcaaagctgcacttctcttccatgcactccctctccaggttgccttgcacaaattcctccagcttgccactgttgtatctcttgggtctgttcaggatcttgttggcattctcatggtccaggaaaactgtggaaacagggagagaaaaaccacacaacatatttaaagattgatgaagacaactaactgtaatatgctgctttttgttcttctcttcactgacctaagagatctaggaacccctagtgatggagttggccactccctctctgcgcgctcgctcgctcactgaggccgcccgggcaaagcccgggcgtcgggcgacctttggtcgcccggcctcagtgagcgagcgagcgcgcagagagggagtggccaa

SEQ ID NO: 92 - DNA, 3570 bp, synthetic construct
  misc_feature 1..3570: note = Synthetic
  source 1..3570: mol_type = other DNA
ttggccactccctctctgcgcgctcgctcgctcactgaggccgggcgaccaaaggtcgcccgacgcccgggctttgcccgggcggcctcagtgagcgagcgagcgcgcagagagggagtggccaactccatcactaggggttcctagatctcttaggtcagtgaagagaagaacaaaaagcagcatattacagttagttgtcttcatcaatctttaaatatgttgtgtggtttttctctccctgtttccacagtttttcttgatcatgaaaatgccaacaaaattctgaataggccaaagaggtataattcagggaaattggaagagtttgttcaagggaaccttgagagagaatgtatggaagaaaagtgtagttttgaagaagcaagagaagtttttgaaaacactgaaagaacaactgaattttggaagcagtatgttgatggagatcagtgcgagtccaatccatgtttaaatgggggcagttgcaaggatgacattaattcctatgaatgttggtgtccctttggatttgaaggaaagaactgtgaattagatgtaacatgtaacattaagaatggcagatgtgagcagttttgtaaaaatagtgctgataacaaggtggtttgctcctgtactgagggatatagacttgcagaaaaccagaagtcctgtgaaccagcagtgccatttccatgtggaagagtttctgtttcacaaacttctaagctcaccagagctgagactgtttttcctgatgtggactatgtaaattctactgaagctgaaaccattttggataacatcactcaaagcacccaatcatttaatgacttcactagggttgttggtggagaagatgccaaaccaggacaattcccttggcaggttgttttgaatggtaaagttgatgcattctgtggaggctctattgttaatgaaaaatggattgtaactgctgcccactgtgttgaaactggtgttaaaattacagttgtggcaggtgaacataatattgaggagacagaacatacagagcaaaagagaaatgtgattagaattattcctcaccacaactacaatgcagctattaataagtacaaccatgacattgcccttctggaactggatgaacccttagtgctaaacagctatgttacacctatttgcattgctgacaaggaatacaccaacatcttcctcaaatttggatctggctatgtaagtggctggggaagagtcttccacaaagggagatcagctttagttcttcagtaccttagagttccacttgttgacagagccacatgtcttaggtctacaaagttcaccatctataacaacatgttctgtgctggcttccatgaaggaggtagagattcatgtcaaggagatagtgggggaccccatgttactgaagtggaagggaccagtttcttaactggaattattagctggggtgaagagtgtgcaatgaaaggcaaatatggaatatataccaaggtatccaggtatgtcaactggattaaggaaaaaacaaagctcacttaacctctactgtgccttctagttgccagccatctgttgtttgcccctcccccttgccttccttgaccctggaaggtgccactcccactgtcctttcctaataaaatgaggaaattgcatcacattgtctgagtaggtgtcattctattctggggggtggggtggggcaggacagcaagggggaggattgggaagacaatagcaggcatgctggggatgcagtgggctctatggcttctgaggtggaaagaaccagctggggctctagggggtatccccaaaaaacctcccacacctccccctgaacctgaaacataaaatgaatgcaattgttgttgttaacttgtttattgcagcttataatggttacaaataaagcaatagcatcacaaatttcacaaataaagcatttttttcactgcattctagttgtggtttgtccaaactcatcaatgtatcttatcatgtctgtcaggtcagtttggttttttctttgatccagttcacatatctggacaccttggtgtagatgccatacttgcccttcatggcacattcctctccccagctgatgatgcctgtcaggaagctggtgccctccacctctgtcacgtgtgggcctccagagtctccttggcagctgtctctgcctccctcatggaagccagcacagaacatgttgttgtagatggtgaacttggtgcttctcaggcaggtggctctgtccaccagggggactctcaggtattgcagcaccagggcagacctgcccttgtggaacactctgccccagccagacacgtagccagagccaaacttcaggaagatgttggtgtactctttgtctgcaatgcagatgggggtaacatagctgttcagcaccagaggctcatcaagttccagcagggcaatgtcatggttgtacttgttgatggctgcattgtagttgtggtgagggatgatcctgatcacatttctcttctgctctgtgtgctctgtttcttctatgttgtgttcaccagccaccactgtgatcttgacacctgtttccacacagtgggcagctgtcacaatccatttttcattcacaatgctgcccccacagaaggcatccaccttgccattcagcaccacctgccatgggaactggccaggcttggcatcctctcctcccaccactctggtgaagtcattgaagctctgggtgctctgggtgatgttgtccaggatggtctcagcctcagtgctgttcacatagtccacatcagggaacactgtttcagccctggtcagcttggaggtctgggacacagacactctgccacaggggaaagggacagcaggttcacagctcttctggttttcagccagcctgtagccctctgtgcagctgcacaccaccttgttgtctgctgagttcttgcagaactgttcacatctgccattcttgatgttgcaggtgacatccagctcacagttcttgccctcaaagccaaaagggcaccagcactcatagctgttgatgtcatctttgcagctgcctccattcaggcaagggttgctctcacactggtctccatcaacgtactgcttccagaactcagtggttctctctgtgttttcaaacacttctctggcttcctcaaagctgcacttctcttccatgcactccctctccaggttgccctgcacaaactcctccagcttgccactgttgtatctcttgggtctgttgaggatcttgttggcattctcatggtccaggaaaactgtggaaacagggagagaaaaaccacacaacatatttaaagattgatgaagacaactaactgtaatatgctgctttttgttcttctcttcactgacctaagagatctaggaacccctagtgatggagttggccactccctctctgcgcgctcgctcgctcactgaggccgcccgggcaaagcccgggcgtcgggcgacctttggtcgcccggcctcagtgagcgagcgagcgcgcagagagggagtggccaa

SEQ ID NO: 93 - DNA, 3570 bp, synthetic construct
  misc_feature 1..3570: note = Synthetic
  source 1..3570: mol_type = other DNA
ttggccactccctctctgcgcgctcgctcgctcactgaggccgggcgaccaaaggtcgcccgacgcccgggctttgcccgggcggcctcagtgagcgagcgagcgcgcagagagggagtggccaactccatcactaggggttcctagatctcttaggtcagtgaagagaagaacaaaaagcagcatattacagttagttgtcttcatcaatctttaaatatgttgtgtggtttttctctccctgtttccacagtttttcttgatcatgaaaatgccaacaaaattctgaataggccaaagaggtataattcagggaaattggaagagtttgttcaagggaaccttgagagagaatgtatggaagaaaagtgtagttttgaagaagcaagagaagtttttgaaaacactgaaagaacaactgaattttggaagcagtatgttgatggagatcagtgcgagtccaatccatgtttaaatgggggcagttgcaaggatgacattaattcctatgaatgttggtgtccctttggatttgaaggaaagaactgtgaattagatgtaacatgtaacattaagaatggcagatgtgagcagttttgtaaaaatagtgctgataacaaggtggtttgctcctgtactgagggatatagacttgcagaaaaccagaagtcctgtgaaccagcagtgccatttccatgtggaagagtttctgtttcacaaacttctaagctcaccagagctgagactgtttttcctgatgtggactatgtaaattctactgaagctgaaaccattttggataacatcactcaaagcacccaatcatttaatgacttcactagggttgttggtggagaagatgccaaaccaggacaattcccttggcaggttgttttgaatggtaaagttgatgcattctgtggaggctctattgttaatgaaaaatggattgtaactgctgcccactgtgttgaaactggtgttaaaattacagttgtggcaggtgaacataatattgaggagacagaacatacagagcaaaagagaaatgtgattagaattattcctcaccacaactacaatgcagctattaataagtacaaccatgacattgcccttctggaactggatgaacccttagtgctaaacagctatgttacacctatttgcattgctgacaaggaatacaccaacatcttcctcaaatttggatctggctatgtaagtggctggggaagagtcttccacaaagggagatcagctttagttcttcagtaccttagagttccacttgttgacagagccacatgtcttaggtctacaaagttcaccatctataacaacatgttctgtgctggcttccatgaaggaggtagagattcatgtcaaggagatagtgggggaccccatgttactgaagtggaagggaccagtttcttaactggaattattagctggggtgaagagtgtgcaatgaaaggcaaatatggaatatataccaaggtatccaggtatgtcaactggattaaggaaaaaacaaagctcacttaacctctactgtgccttctagttgccagccatctgttgtttgcccctcccccttgccttccttgaccctggaaggtgccactcccactgtcctttcctaataaaatgaggaaattgcatcacattgtctgagtaggtgtcattctattctggggggtggggtggggcaggacagcaagggggaggattgggaagacaatagcaggcatgctggggatgcagtgggctctatggcttctgaggtggaaagaaccagctggggctctagggggtatccccaaaaaacctcccacacctccccctgaacctgaaacataaaatgaatgcaattgttgttgttaacttgtttattgcagcttataatggttacaaataaagcaatagcatcacaaatttcacaaataaagcatttttttcactgcattctagttgtggtttgtccaaactcatcaatgtatcttatcatgtctgtcaggtcagcttggttttctctttgatccagttcacatatctgctaaccttggtgtagatgccatacttgcccttcatggcacactcttccccccagctgatgatgcctgtcaggaagctggtgccctccacctctgtcacatgtgggcctccagagtctccctggcagctgtctctgcctccctcatggaagccagcacagaacatgttgttgtagatggtgaacttggtgcttctcaggcaggtggccctgtccaccagggggactctcaggtattgcagtaccagggcagacctgcccttgtggaacactctgccccagccagacacatagccactgccaaacttgaggaagatgttggtgtactccttgtcagcaatgcagatgggggtaacatagctgttcagcaccagaggctcatcaagttccagcagggcaatgtcatggttgtacttgttgatggctgcattgtagttgtggtgagggatgatcctgatcacatttctcttctgctctgtgtgctctgtttcttctatgttgtgctctccagccaccactgtgattttgacacctgtctccacacagtgggcagctgtcacaatccatttctcattcacaatgctgcctccacagaaggcatccactttgccattcagcaccacctgccatgggaactggccaggcttggcatcctctccacccaccaccctggtgaagtcattgaaggactgggtgctctgggtgatgttgtccaggatggtttcagcctctgtgctgttcacatagtccacatcagggaacacagtctcagccctggtcagcttgctggtctgggacacagacactctgccacaggggaaagggacagcaggttcacaggacttctggttttctgccagcctgtagccctctgtgcagctgcacaccaccttgttgtcagcagagttcttgcagaactgttcacatctgccattcttgatgttgcaggtgacatccagctcacagtttttgccttcaaagccaaaagggcaccagcattcatagctgttgatgtcatccttgcagctgcctccattcaggcaagggttgctctcacactggtctccatccacatactgcttccagaactcagtggttctctctgtgttttcaaacacttccctggcttcttcaaagctgcacttttcttccatgcactctctctccaggttgccttgcacaaactcctccagcttgccagagttgtatctcttgggtctgttcaggatcttgttggcattctcatggtccaggaaaactgtggaaacagggagagaaaaaccacacaacatatttaaagattgatgaagacaactaactgtaatatgctgctttttgttcttctcttcactgacctaagagatctaggaacccctagtgatggagttggccactccctctctgcgcgctcgctcgctcactgaggccgcccgggcaaagcccgggcgtcgggcgacctttggtcgcccggcctcagtgagcgagcgagcgcgcagagagggagtggccaa

SEQ ID NO: 94 - DNA, 3570 bp, synthetic construct
  misc_feature 1..3570: note = Synthetic
  source 1..3570: mol_type = other DNA
ttggccactccctctctgcgcgctcgctcgctcactgaggccgggcgaccaaaggtcgcccgacgcccgggctttgcccgggcggcctcagtgagcgagcgagcgcgcagagagggagtggccaactccatcactaggggttcctagatctcttaggtcagtgaagagaagaacaaaaagcagcatattacagttagttgtcttcatcaatctttaaatatgttgtgtggtttttctctccctgtttccacagtttttcttgatcatgaaaatgccaacaaaattctgaataggccaaagaggtataattcagggaaattggaagagtttgttcaagggaaccttgagagagaatgtatggaagaaaagtgtagttttgaagaagcaagagaagtttttgaaaacactgaaagaacaactgaattttggaagcagtatgttgatggagatcagtgcgagtccaatccatgtttaaatgggggcagttgcaaggatgacattaattcctatgaatgttggtgtccctttggatttgaaggaaagaactgtgaattagatgtaacatgtaacattaagaatggcagatgtgagcagttttgtaaaaatagtgctgataacaaggtggtttgctcctgtactgagggatatagacttgcagaaaaccagaagtcctgtgaaccagcagtgccatttccatgtggaagagtttctgtttcacaaacttctaagctcaccagagctgagactgtttttcctgatgtggactatgtaaattctactgaagctgaaaccattttggataacatcactcaaagcacccaatcatttaatgacttcactagggttgttggtggagaagatgccaaaccaggacaattcccttggcaggttgttttgaatggtaaagttgatgcattctgtggaggctctattgttaatgaaaaatggattgtaactgctgcccactgtgttgaaactggtgttaaaattacagttgtggcaggtgaacataatattgaggagacagaacatacagagcaaaagagaaatgtgattagaattattcctcaccacaactacaatgcagctattaataagtacaaccatgacattgcccttctggaactggatgaacccttagtgctaaacagctatgttacacctatttgcattgctgacaaggaatacaccaacatcttcctcaaatttggatctggctatgtaagtggctggggaagagtcttccacaaagggagatcagctttagttcttcagtaccttagagttccacttgttgacagagccacatgtcttaggtctacaaagttcaccatctataacaacatgttctgtgctggcttccatgaaggaggtagagattcatgtcaaggagatagtgggggaccccatgttactgaagtggaagggaccagtttcttaactggaattattagctggggtgaagagtgtgcaatgaaaggcaaatatggaatatataccaaggtatccaggtatgtcaactggattaaggaaaaaacaaagctcacttaacctctactgtgccttctagttgccagccatctgttgtttgcccctcccccttgccttccttgaccctggaaggtgccactcccactgtcctttcctaataaaatgaggaaattgcatcacattgtctgagtaggtgtcattctattctggggggtggggtggggcaggacagcaagggggaggattgggaagacaatagcaggcatgctggggatgcagtgggctctatggcttctgaggtggaaagaaccagctggggctctagggggtatccccaaaaaacctcccacacctccccctgaacctgaaacataaaatgaatgcaattgttgttgttaacttgtttattgcagcttataatggttacaaataaagcaatagcatcacaaatttcacaaataaagcatttttttcactgcattctagttgtggtttgtccaaactcatcaatgtatcttatcatgtctgtcaggtcagcttggttttctctttgatccagttcacatatctgctaaccttggtgtagatgccatacttgcccttcatggcacactcttccccccagctgatgatgcctgtcaggaagctggtgccctccacctctgtcacgtgtgggcctccagagtctccctggcagctgtctctgcctccctcatggaagccggcacagaacatgttgttgtagatggtgaacttggtgcttctcaggcaggtggccctgtccaccagggggactctcaggtattgcagtaccagggcagacctgcccttgtggaacactctgccccagccagacacatagccactgccaaacttgaggaagatgttggtgtactccttgtcagcaatgcagatgggggtaacatagctgttcagcaccagaggctcatcaagttccagcagggcaatgtcgtggttgtacttgttgatggctgcattgtagttgtggtgagggatgatccggatcacatttctcttctgctctgtgtgctctgtttcttctatgttgtgctctccagccaccactgtgattttgacacctgtctccacacagtgggcggctgtcacaatccatttctcattcacaatgctgcctccacagaaggcatccactttgccattcagcaccacctgccatgggaactggccaggcttggcatcctctccacccaccacccgggtgaagtcattgaaggactgggtgctctgggtgatgttgtccaggatggtttcagcctctgtgctgttcacgtagtccacatcagggaacacagtctcagccctggtcagcttgctggtctgggacacagacactctgccacaggggaaagggacagcaggttcacaggacttctggttttctgccagcctgtagccctctgtgcagctgcacaccaccttgttgtcagcagagttcttgcagaactgttcacatctgccattcttgatgttgcaggtgacatccagctcacagtttttgccttcaaagccaaaagggcaccagcattcgtagctgttgatgtcatccttgcagctgcctccattcaggcaagggttgctctcacactggtctccatccacgtactgcttccagaactcagtggttctctctgtgttttcaaacacttcccgggcttcttcaaagctgcacttttcttccatgcactctctctccaggttgccttgcacaaactcctccagcttgccagagttgtatctcttgggtctgttcaggatcttgttggcattctcatggtccaggaaaactgtggaaacagggagagaaaaaccacacaacatatttaaagattgatgaagacaactaactgtaatatgctgctttttgttcttctcttcactgacctaagagatctaggaacccctagtgatggagttggccactccctctctgcgcgctcgctcgctcactgaggccgcccgggcaaagcccgggcgtcgggcgacctttggtcgcccggcctcagtgagcgagcgagcgcgcagagagggagtggccaa

SEQ ID NO: 95 - DNA, 3570 bp, synthetic construct
  misc_feature 1..3570: note = Synthetic
  source 1..3570: mol_type = other DNA
ttggccactccctctctgcgcgctcgctcgctcactgaggccgggcgaccaaaggtcgcccgacgcccgggctttgcccgggcggcctcagtgagcgagcgagcgcgcagagagggagtggccaactccatcactaggggttcctagatctcttaggtcagtgaagagaagaacaaaaagcagcatattacagttagttgtcttcatcaatctttaaatatgttgtgtggtttttctctccctgtttccacagtttttcttgatcatgaaaatgccaacaaaattctgaataggccaaagaggtataattcagggaaattggaagagtttgttcaagggaaccttgagagagaatgtatggaagaaaagtgtagttttgaagaagcaagagaagtttttgaaaacactgaaagaacaactgaattttggaagcagtatgttgatggagatcagtgcgagtccaatccatgtttaaatgggggcagttgcaaggatgacattaattcctatgaatgttggtgtccctttggatttgaaggaaagaactgtgaattagatgtaacatgtaacattaagaatggcagatgtgagcagttttgtaaaaatagtgctgataacaaggtggtttgctcctgtactgagggatatagacttgcagaaaaccagaagtcctgtgaaccagcagtgccatttccatgtggaagagtttctgtttcacaaacttctaagctcaccagagctgagactgtttttcctgatgtggactatgtaaattctactgaagctgaaaccattttggataacatcactcaaagcacccaatcatttaatgacttcactagggttgttggtggagaagatgccaaaccaggacaattcccttggcaggttgttttgaatggtaaagttgatgcattctgtggaggctctattgttaatgaaaaatggattgtaactgctgcccactgtgttgaaactggtgttaaaattacagttgtggcaggtgaacataatattgaggagacagaacatacagagcaaaagagaaatgtgattagaattattcctcaccacaactacaatgcagctattaataagtacaaccatgacattgcccttctggaactggatgaacccttagtgctaaacagctatgttacacctatttgcattgctgacaaggaatacaccaacatcttcctcaaatttggatctggctatgtaagtggctggggaagagtcttccacaaagggagatcagctttagttcttcagtaccttagagttccacttgttgacagagccacatgtcttaggtctacaaagttcaccatctataacaacatgttctgtgctggcttccatgaaggaggtagagattcatgtcaaggagatagtgggggaccccatgttactgaagtggaagggaccagtttcttaactggaattattagctggggtgaagagtgtgcaatgaaaggcaaatatggaatatataccaaggtatccaggtatgtcaactggattaaggaaaaaacaaagctcacttaacctctactgtgccttctagttgccagccatctgttgtttgcccctcccccttgccttccttgaccctggaaggtgccactcccactgtcctttcctaataaaatgaggaaattgcatcacattgtctgagtaggtgtcattctattctggggggtggggtggggcaggacagcaagggggaggattgggaagacaatagcaggcatgctggggatgcagtgggctctatggcttctgaggtggaaagaaccagctggggctctagggggtatccccaaaaaacctcccacacctccccctgaacctgaaacataaaatgaatgcaattgttgttgttaacttgtttattgcagcttataatggttacaaataaagcaatagcatcacaaatttcacaaataaagcatttttttcactgcattctagttgtggtttgtccaaactcatcaatgtatcttatcatgtctgtcaggtcagcttggttttctctttgatccagttgacatatctgctcaccttggtgtagatgccatacttgcccttcatggcacactcttccccccagctgatgatgcctgtcaggaagctggtgccctccacctctgtcacatgtgggcctccagagtctccctggcagctgtctctgcctccctcatggaagccagcacagaacatgttgttgtagatggtgaacttggtgcttctcaggcaggtggctctgtccaccagggggaccctcaggtattgcagcaccagggcagacctgcccttgtggaacactctgccccagccagacacatagccagagccaaacttcaggaagatgttggtgtactccttgtcagcaatgcagatgggggtaacatagctgttcagcaccagaggctcatcaagttccagcagggcaatgtcatggttgtacttgttgatggcagcattgtagttgtggtgagggatgattctgatcacattccttttctgctctgtgtgctctgtttcctcaatgttgtgctctccagccaccactgtgatcttgacacctgtctccacacagtgggcagctgtcacaatccacttttcattcacaatgctgcctccacagaaggcatccactttgccattgagcaccacctgccatgggaactggccaggcttggcatcctctccacccaccaccctggtgaagtcattgaaggactgggtgctctgggtgatgttgtccaggatggtttcagcttctgtgctgttcacatagtccacatcagggaacactgtctcagccctggtcagtttgctggtctggctcactgacactctgccacaggggaaaggcacagcaggttcacaggacttctggttttctgccagcctgtagccctctgtgcagctgcacaccaccttgttgtcagcagagttcttgcagaactgttcacatctgccatttttgatgttgcaggtgacatccagctcacagttcttgccttcaaagccaaaagggcaccagcattcatagctgttgatgtcatccttgcaggagcctccattcaggcaagggttgctctcacactggtctccatcaacatactgcttccagaactcagtggttctttctgtgttctcaaacacttccctggcttcctcaaagctgcacttctcttccatgcactccctctccaggttgccttgcacaaattcctccagcttgccactgttgtatctcttgggtctgttcaggatcttgttggcattctcatggtccaggaaaactgtggaaacagggagagaaaaaccacacaacatatttaaagattgatgaagacaactaactgtaatatgctgctttttgttcttctcttcactgacctaagagatctaggaacccctagtgatggagttggccactccctctctgcgcgctcgctcgctcactgaggccgcccgggcaaagcccgggcgtcgggcgacctttggtcgcccggcctcagtgagcgagcgagcgcgcagagagggagtggccaa

SEQ ID NO: 96 - DNA, 3570 bp, synthetic construct
  misc_feature 1..3570: note = Synthetic
  source 1..3570: mol_type = other DNA
ttggccactccctctctgcgcgctcgctcgctcactgaggccgggcgaccaaaggtcgcccgacgcccgggctttgcccgggcggcctcagtgagcgagcgagcgcgcagagagggagtggccaactccatcactaggggttcctagatctcttaggtcagtgaagagaagaacaaaaagcagcatattacagttagttgtcttcatcaatctttaaatatgttgtgtggtttttctctccctgtttccacagtttttcttgatcatgaaaatgccaacaaaattctgaataggccaaagaggtataattcagggaaattggaagagtttgttcaagggaaccttgagagagaatgtatggaagaaaagtgtagttttgaagaagcaagagaagtttttgaaaacactgaaagaacaactgaattttggaagcagtatgttgatggagatcagtgcgagtccaatccatgtttaaatgggggcagttgcaaggatgacattaattcctatgaatgttggtgtccctttggatttgaaggaaagaactgtgaattagatgtaacatgtaacattaagaatggcagatgtgagcagttttgtaaaaatagtgctgataacaaggtggtttgctcctgtactgagggatatagacttgcagaaaaccagaagtcctgtgaaccagcagtgccatttccatgtggaagagtttctgtttcacaaacttctaagctcaccagagctgagactgtttttcctgatgtggactatgtaaattctactgaagctgaaaccattttggataacatcactcaaagcacccaatcatttaatgacttcactagggttgttggtggagaagatgccaaaccaggacaattcccttggcaggttgttttgaatggtaaagttgatgcattctgtggaggctctattgttaatgaaaaatggattgtaactgctgcccactgtgttgaaactggtgttaaaattacagttgtggcaggtgaacataatattgaggagacagaacatacagagcaaaagagaaatgtgattagaattattcctcaccacaactacaatgcagctattaataagtacaaccatgacattgcccttctggaactggatgaacccttagtgctaaacagctatgttacacctatttgcattgctgacaaggaatacaccaacatcttcctcaaatttggatctggctatgtaagtggctggggaagagtcttccacaaagggagatcagctttagttcttcagtaccttagagttccacttgttgacagagccacatgtcttaggtctacaaagttcaccatctataacaacatgttctgtgctggcttccatgaaggaggtagagattcatgtcaaggagatagtgggggaccccatgttactgaagtggaagggaccagtttcttaactggaattattagctggggtgaagagtgtgcaatgaaaggcaaatatggaatatataccaaggtatccaggtatgtcaactggattaaggaaaaaacaaagctcacttaacctctactgtgccttctagttgccagccatctgttgtttgcccctcccccttgccttccttgaccctggaaggtgccactcccactgtcctttcctaataaaatgaggaaattgcatcacattgtctgagtaggtgtcattctattctggggggtggggtggggcaggacagcaagggggaggattgggaagacaatagcaggcatgctggggatgcagtgggctctatggcttctgaggtggaaagaaccagctggggctctagggggtatccccaaaaaacctcccacacctccccctgaacctgaaacataaaatgaatgcaattgttgttgttaacttgtttattgcagcttataatggttacaaataaagcaatagcatcacaaatttcacaaataaagcatttttttcactgcattctagttgtggtttgtccaaactcatcaatgtatcttatcatgtctgtcaggtcagcttggttttctctttgatccagttgacatatctgctcaccttggtgtagatgccgtacttgcccttcatggcacactcttccccccagctgatgatgcctgtcaggaagctggtgccctccacctctgtcacgtgtgggcctccagagtctccctggcagctgtctctgcctccctcatggaagccggcacagaacatgttgttgtagatggtgaacttggtgcttctcaggcaggtggctctgtccaccagggggacccgcaggtattgcagcaccagggcagacctgcccttgtggaacactctgccccagccagacacgtagccagagccaaacttcaggaagatgttggtgtactccttgtcggcaatgcagatgggggtaacatagctgttcagcaccagaggctcatcaagttccagcagggcaatgtcgtggttgtacttgttgatggcagcattgtagttgtggtgagggatgattctgatcacattccgtttctgctctgtgtgctctgtttcctcgatgttgtgctctccagccaccactgtgatcttgacacctgtctccacacagtgggcggctgtcacgatccacttttcattcacaatgctgcctccacagaaggcatccactttgccattgagcaccacctgccatgggaactggccaggcttggcatcctctccacccaccacccgggtgaagtcattgaaggactgggtgctctgggtgatgttgtccaggatggtttcagcttctgtgctgttcacgtagtccacatcagggaacactgtctcagcccgggtcagtttgctggtctggctcactgacactctgccacaggggaaaggcacggcaggttcacaggacttctggttttctgccagcctgtagccctctgtgcagctgcacaccaccttgttgtcagcagagttcttgcagaactgttcacatctgccatttttgatgttgcaggtgacatccagctcacagttcttgccttcaaagccaaaagggcaccagcattcgtagctgttgatgtcatccttgcaggagcctccattcaggcaagggttgctctcgcactggtctccatcaacgtactgcttccagaactcagtggttctttctgtgttctcgaacacttcccgggcttcctcaaagctgcacttctcttccatgcactccctctccaggttgccttgcacaaattcctccagcttgccactgttgtatctcttgggtctgttcaggatcttgttggcattctcatggtccaggaaaactgtggaaacagggagagaaaaaccacacaacatatttaaagattgatgaagacaactaactgtaatatgctgctttttgttcttctcttcactgacctaagagatctaggaacccctagtgatggagttggccactccctctctgcgcgctcgctcgctcactgaggccgcccgggcaaagcccgggcgtcgggcgacctttggtcgcccggcctcagtgagcgagcgagcgcgcagagagggagtggccaa

SEQ ID NO: 97 - protein, 431 aa, synthetic construct
  REGION 1..431: note = Synthetic
FLDHENANKILNRPKRYNSGKLEEFVQGNLERECMEEKCSFEEAREVFENTERTTEFWKQYVDGDQCESNPCLNGGSCKDDINSYECWCPFGFEGKNCELDVTCNIKNGRCEQFCKNSADNKVVCSCTEGYRLAENQKSCEPAVPFPCGRVSVSQTSKLTRAETVFPDVDYVNSTEAETILDNITQSTQSFNDFTRVVGGEDAKPGQFPWQVVLNGKVDAFCGGSIVNEKWIVTAAHCVETGVKITVVAGEHNIEETEHTEQKRNVIRIIPHHNYNAAINKYNHDIALLELDEPLVLNSYVTPICIADKEYTNIFLKFGSGYVSGWGRVFHKGRSALVLQYLRVPLVDRATCLRSTKFTIYNNMFCAGFHEGGRDSCQGDSGGPHVTEVEGTSFLTGIISWGEECAMKGKYGIYTKVSRYVNWIKEKTKLT

SEQ ID NO: 98 - DNA, 131 bp, synthetic construct
  misc_feature 1..131: note = Synthetic
  source 1..131: mol_type = other DNA
cagacatgataagatacattgatgagtttggacaaaccacaactagaatgcagtgaaaaaaatgctttatttgtgaaatttgtgatgctattgctttatttgtaaccattataagctgcaataaacaagtt

SEQ ID NO: 99 - DNA, 224 bp, synthetic construct
  misc_feature 1..224: note = Synthetic
  source 1..224: mol_type = other DNA
ctgtgccttctagttgccagccatctgttgtttgcccctcccccttgccttccttgaccctggaaggtgccactcccactgtcctttcctaataaaatgaggaaattgcatcacattgtctgagtaggtgtcattctattctggggggtggggtggggcaggacagcaagggggaggattgggaagacaatagcaggcatgctggggatgcagtgggctctatg

SEQ ID NO: 100 - DNA, 100 bp, synthetic construct
  misc_feature 1..100: note = Synthetic
  source 1..100: mol_type = other DNA
taggtcagtgaagagaagaacaaaaagcagcatattacagttagttgtcttcatcaatctttaaatatgttgtgtggtttttctctccctgtttccacag

SEQ ID NO: 101 - DNA, 3280 bp, synthetic construct
  misc_feature 1..3280: note = Synthetic
  misc_feature 9..108: note = Splice acceptor
  misc_feature 111..1406: note = F9 wildtype
  misc_feature 1410..1637: note = bGH pA
  misc_feature 1744..1874: note = SV40 pA
  misc_feature 1875..3170: note = F9 codon optimized
  misc_feature 3173..3272: note = Splice acceptor
  source 1..3280: mol_type = other DNA
agatctcttaggtcagtgaagagaagaacaaaaagcagcatattacagttagttgtcttcatcaatctttaaatatgttgtgtggtttttctctccctgtttccacagtttttcttgatcatgaaaacgccaacaaaattctgaatcggccaaagaggtataattcaggtaaattggaagagtttgttcaagggaaccttgagagagaatgtatggaagaaaagtgtagttttgaagaagcacgagaagtttttgaaaacactgaaagaacaactgaattttggaagcagtatgttgatggagatcagtgtgagtccaatccatgtttaaatggcggcagttgcaaggatgacattaattcctatgaatgttggtgtccctttggatttgaaggaaagaactgtgaattagatgtaacatgtaacattaagaatggcagatgcgagcagttttgtaaaaatagtgctgataacaaggtggtttgctcctgtactgagggatatcgacttgcagaaaaccagaagtcctgtgaaccagcagtgccatttccatgtggaagagtttctgtttcacaaacttctaagctcacccgtgctgagactgtttttcctgatgtggactatgtaaattctactgaagctgaaaccattttggataacatcactcaaagcacccaatcatttaatgacttcactcgggttgttggtggagaagatgccaaaccaggtcaattcccttggcaggttgttttgaatggtaaagttgatgcattctgtggaggctctatcgttaatgaaaaatggattgtaactgctgcccactgtgttgaaactggtgttaaaattacagttgtcgcaggtgaacataatattgaggagacagaacatacagagcaaaagcgaaatgtgattcgaattattcctcaccacaactacaatgcagctattaataagtacaaccatgacattgcccttctggaactggacgaacccttagtgctaaacagctacgttacacctatttgcattgctgacaaggaatacacgaacatcttcctcaaatttggatctggctatgtaagtggctggggaagagtcttccacaaagggagatcagctttagttcttcagtaccttagagttccacttgttgaccgagccacatgtcttcgatctacaaagttcaccatctataacaacatgttctgtgctggcttccatgaaggaggtagagattcatgtcaaggagatagtgggggaccccatgttactgaagtggaagggaccagtttcttaactggaattattagctggggtgaagagtgtgcaatgaaaggcaaatatggaatatataccaaggtatcccggtatgtcaactggattaaggaaaaaacaaagctcacttaacctcgactgtgccttctagttgccagccatctgttgtttgcccctcccccgtgccttccttgaccctggaaggtgccactcccactgtcctttcctaataaaatgaggaaattgcatcgcattgtctgagtaggtgtcattctattctggggggtggggtggggcaggacagcaagggggaggattgggaagacaatagcaggcatgctggggatgcggtgggctctatggcttctgaggcggaaagaaccagctggggctctagggggtatccccaaaaaacctcccacacctccccctgaacctgaaacataaaatgaatgcaattgttgttgttaacttgtttattgcagcttataatggttacaaataaagcaatagcatcacaaatttcacaaataaagcatttttttcactgcattctagttgtggtttgtccaaactcatcaatgtatcttatcatgtctgttaggtgagcttagtcttttcttttatccaattcacgtagcgagagaccttcgtatagatgccatatttccccttcatcgcacattcctccccccaacttattatcccggtcaagaaacttgttccttcgacttcagtgacgtgtggtccacctgaatcaccttggcatgagtcgcgaccgccctcgtgaaacccagcacaaaacatgttattgtaaatcgtaaatttcgtggaccgaagacaggtcgctctatcgaccaacgggacgcgcaaatattgcagaacgagggctgatcgacctttgtggaagacccgcccccacccactcacatatccgctcccaaatttcaagaagatatttgtatattctttatcggctatacaaatcggggtaacataggagttaagtacgagtggctcgtccagctccaggagggctatatcatggttgtacttgtttatagcggcattataattgtgatggggtatgatcctgataacattccttttctgttcagtatgctcagtttcttcaatgttgtgttcgccagccacgaccgtaatcttaacccccgtctcgacacagtgtgcggccgttacaatccacttttcattgactatggagcccccacaaaacgcgtcgacttttccgttgagcaccacctgccatggaaattggccaggtttagcgtcctcgcccccgacaaccctagtaaagtcattaaatgactgtgtggattgtgttatattatcaagaatcgtttcggcttcagtagagttaacgtagtccacatcgggaaaaactgtctcggcccttgtcaactttgatgtctgggacacacttacccgaccgcacgggaagggcaccgccggttcacagctcttttgattctcagcgagccggtagccctcagtgcaactacacacaactttgttgtcggcggaatttttacagaattgctcgcatcgtccatttttaatgttgcaggtgacgtccaactcgcagttttttccttcaaaaccaaaagggcaccaacactcgtaggaatttatatcgtctttacaactccccccattcagacatggattagattcgcattggtccccatcgacatattgcttccagaactcagtggtccgttctgtattctcaaacacctcgcgcgcttcttcaaaactgcatttttcctccatacactctcgctccaagttcccttgcacgaattcttcaagctttcctgagttataccttttaggccggttaagtatcttattcgcgttttcgtggtccagaaaaactgtggaaacagggagagaaaaaccacacaacatatttaaagattgatgaagacaactaactgtaatatgctgctttttgttcttctcttcactgacctaagagatct

SEQ ID NO: 102 - DNA, 3280 bp, synthetic construct
  misc_feature 1..3280: note = Synthetic
  source 1..3280: mol_type = other DNA
agatctcttaggtcagtgaagagaagaacaaaaagcagcatattacagttagttgtcttcatcaatctttaaatatgttgtgtggtttttctctccctgtttccacagtttttcttgatcatgaaaacgccaacaaaattctgaatcggccaaagaggtataattcaggtaaattggaagagtttgttcaagggaaccttgagagagaatgtatggaagaaaagtgtagttttgaagaagcacgagaagtttttgaaaacactgaaagaacaactgaattttggaagcagtatgttgatggagatcagtgtgagtccaatccatgtttaaatggcggcagttgcaaggatgacattaattcctatgaatgttggtgtccctttggatttgaaggaaagaactgtgaattagatgtaacatgtaacattaagaatggcagatgcgagcagttttgtaaaaatagtgctgataacaaggtggtttgctcctgtactgagggatatcgacttgcagaaaaccagaagtcctgtgaaccagcagtgccatttccatgtggaagagtttctgtttcacaaacttctaagctcacccgtgctgagactgtttttcctgatgtggactatgtaaattctactgaagctgaaaccattttggataacatcactcaaagcacccaatcatttaatgacttcactcgggttgttggtggagaagatgccaaaccaggtcaattcccttggcaggttgttttgaatggtaaagttgatgcattctgtggaggctctatcgttaatgaaaaatggattgtaactgctgcccactgtgttgaaactggtgttaaaattacagttgtcgcaggtgaacataatattgaggagacagaacatacagagcaaaagcgaaatgtgattcgaattattcctcaccacaactacaatgcagctattaataagtacaaccatgacattgcccttctggaactggacgaacccttagtgctaaacagctacgttacacctatttgcattgctgacaaggaatacacgaacatcttcctcaaatttggatctggctatgtaagtggctggggaagagtcttccacaaagggagatcagctttagttcttcagtaccttagagttccacttgttgaccgagccacatgtcttcgatctacaaagttcaccatctataacaacatgttctgtgctggcttccatgaaggaggtagagattcatgtcaaggagatagtgggggaccccatgttactgaagtggaagggaccagtttcttaactggaattattagctggggtgaagagtgtgcaatgaaaggcaaatatggaatatataccaaggtatcccggtatgtcaactggattaaggaaaaaacaaagctcacttaacctcgactgtgccttctagttgccagccatctgttgtttgcccctcccccgtgccttccttgaccctggaaggtgccactcccactgtcctttcctaataaaatgaggaaattgcatcgcattgtctgagtaggtgtcattctattctggggggtggggtggggcaggacagcaagggggaggattgggaagacaatagcaggcatgctggggatgcggtgggctctatggcttctgaggcggaaagaaccagctggggctctagggggtatccccaaaaaacctcccacacctccccctgaacctgaaacataaaatgaatgcaattgttgttgttaacttgtttattgcagcttataatggttacaaataaagcaatagcatcacaaatttcacaaataaagcatttttttcactgcattctagttgtggtttgtccaaactcatcaatgtatcttatcatgtctgtcaagtcagcttggttttctccttaatccagttcacatatctggatacttttgtgtagatcccatactttcccttcatagcacactcctcaccccagctgataatcccagtcaggaagctggttccctccacctcagtcacatggggacccccagaatctccctggcagctgtctctaccaccttcatggaaccctgcacagaacatattgttgtagattgtaaacttggtgctcctcaagcaggttgctctatccaccagaggcaccctcaaatactgcaataccagggcagacctgcctttatggaacaccctgccccagccagacacatatccagacccaaatttcaagaagatgttggtgtactctttatcagcaatacagatgggtgtcacatagctgttcaagaccaggggttcatccagttccaggagggcaatgtcatggttgtacttgttgatagcagcattgtagttgtggtgggggataatcctgatcacattcctcttctgctcagtgtgctcagtttcctcaatattgtgctctccagccaccacagtaatcttgactccagtttccacacagtgggctgcagtcacaatccacttctcatttacaattgaacctccacaaaaggcatccacttttccattgagcactacctgccaggggaactgcccaggcttggcatcctcccctcctaccaccctggtgaagtcattgaagctctgtgtgctctgagtgatattgtcaaggattgtctcagcctcagtgctattcacataatctacatcaggaaagactgtttcagccctagtcagcttgctggtttggctcacagacactctcccacagggaaaaggcactgcaggttcacagctcttctggttttcagccagcctatatccctcagtgcagctacagaccactttgttatcagcagaattcttgcaaaattgctcacacctgccattcttgatattacaggtcacatcaagctcacagtttttcccctcaaatccaaagggacaccaacattcatagctgttgatatcatctttacagctccccccattcaagcagggattgctctcacattgatcaccatccacatactgcttccaaaattcagttgttctctctgtattttcaaacacttctctggcttcctcaaagctgcacttctcttccatacactctctctccagattcccctgtacaaactcttcaagcttgccagagttatacctctttggtctattcagaattttgttggcattttcatgatcaagaaaaactgtggaaacagggagagaaaaaccacacaacatatttaaagattgatgaagacaactaactgtaatatgctgctttttgttcttctcttcactgacctaagagatct

SEQ ID NO: 103 - DNA, 3280 bp, synthetic construct
  misc_feature 1..3280: note = Synthetic
  source 1..3280: mol_type = other DNA
agatctcttaggtcagtgaagagaagaacaaaaagcagcatattacagttagttgtcttcatcaatctttaaatatgttgtgtggtttttctctccctgtttccacagtttttcttgatcatgaaaacgccaacaaaattctgaatcggccaaagaggtataattcaggtaaattggaagagtttgttcaagggaaccttgagagagaatgtatggaagaaaagtgtagttttgaagaagcacgagaagtttttgaaaacactgaaagaacaactgaattttggaagcagtatgttgatggagatcagtgtgagtccaatccatgtttaaatggcggcagttgcaaggatgacattaattcctatgaatgttggtgtccctttggatttgaaggaaagaactgtgaattagatgtaacatgtaacattaagaatggcagatgcgagcagttttgtaaaaatagtgctgataacaaggtggtttgctcctgtactgagggatatcgacttgcagaaaaccagaagtcctgtgaaccagcagtgccatttccatgtggaagagtttctgtttcacaaacttctaagctcacccgtgctgagactgtttttcctgatgtggactatgtaaattctactgaagctgaaaccattttggataacatcactcaaagcacccaatcatttaatgacttcactcgggttgttggtggagaagatgccaaaccaggtcaattcccttggcaggttgttttgaatggtaaagttgatgcattctgtggaggctctatcgttaatgaaaaatggattgtaactgctgcccactgtgttgaaactggtgttaaaattacagttgtcgcaggtgaacataatattgaggagacagaacatacagagcaaaagcgaaatgtgattcgaattattcctcaccacaactacaatgcagctattaataagtacaaccatgacattgcccttctggaactggacgaacccttagtgctaaacagctacgttacacctatttgcattgctgacaaggaatacacgaacatcttcctcaaatttggatctggctatgtaagtggctggggaagagtcttccacaaagggagatcagctttagttcttcagtaccttagagttccacttgttgaccgagccacatgtcttcgatctacaaagttcaccatctataacaacatgttctgtgctggcttccatgaaggaggtagagattcatgtcaaggagatagtgggggaccccatgttactgaagtggaagggaccagtttcttaactggaattattagctggggtgaagagtgtgcaatgaaaggcaaatatggaatatataccaaggtatcccggtatgtcaactggattaaggaaaaaacaaagctcacttaacctcgactgtgccttctagttgccagccatctgttgtttgcccctcccccgtgccttccttgaccctggaaggtgccactcccactgtcctttcctaataaaatgaggaaattgcatcgcattgtctgagtaggtgtcattctattctggggggtggggtggggcaggacagcaagggggaggattgggaagacaatagcaggcatgctggggatgcggtgggctctatggcttctgaggcggaaagaaccagctggggctctagggggtatccccaaaaaacctcccacacctccccctgaacctgaaacataaaatgaatgcaattgttgttgttaacttgtttattgcagcttataatggttacaaataaagcaatagcatcacaaatttcacaaataaagcatttttttcactgcattctagttgtggtttgtccaaactcatcaatgtatcttatcatgtctgtcaggtcagcttggtcttctccttgatccagttcacatacctgctcaccttggtgtagatgccatacttgcccttcatggcacactcctccccccagctgatgatgcctgtcaggaagctggtgccctccacctctgtcacatgggggcccccagagtctccctggcagctgtctctgcctccctcatggaagccagcacagaacatgttgttgtagatggtgaacttggtgctcctcaggcaggtggccctgtccaccaggggcactctcaggtactgcagcaccagggcagacctgcccttgtggaacactctgccccagccagacacatagccagagccaaacttcaggaagatgttggtgtactccttgtcagcaatgcagatgggggtcacatagctgttcagcaccaggggctcatccagctccagcagggcaatgtcatggttgtacttgttgatggcagcattgtagttgtggtgggggatgatcctgatcacattcctcttctgctctgtgtgctctgtctcctcaatgttgtgctccccagccaccactgtgatcttcacccctgtctccacacagtgggcagctgtcacaatccacttctcattcacaatgctgcctccacagaaggcatccaccttgccattcagcaccacctgccaggggaactggccaggcttggcatcctctccccccaccaccctggtgaagtcattgaagctctgggtgctctgggtgatgttgtccaggatggtctcagcctctgtgctgttcacatagtccacatcagggaacactgtctcagccctggtcagcttgctggtctggctcacagacactctgccacaggggaagggcacagcaggctcacagctcttctggttctcagccagcctgtagccctctgtgcagctgcacaccaccttgttgtcagcagagttcttgcagaactgctcacatctgccattcttgatgttgcaggtcacatccagctcacagttcttgccctcaaagccaaaggggcaccagcactcatagctgttgatgtcatccttgcagctgcctccattcaggcaggggttgctctcacactggtctccatccacatactgcttccagaactctgtggttctctctgtgttctcaaacacctccctggcctcctcaaagctgcacttctcctccatgcactctctctccaggttgccctgcacaaactcctccagcttgccagagttgtacctcttgggcctgttcaggatcttgttggcattctcatggtccaggaaaactgtggaaacagggagagaaaaaccacacaacatatttaaagattgatgaagacaactaactgtaatatgctgctttttgttcttctcttcactgacctaagagatct

SEQ ID NO: 104 - DNA, 3280 bp, synthetic construct
  misc_feature 1..3280: note = Synthetic
  source 1..3280: mol_type = other DNA
agatctcttaggtcagtgaagagaagaacaaaaagcagcatattacagttagttgtcttcatcaatctttaaatatgttgtgtggtttttctctccctgtttccacagtttttcttgatcatgaaaacgccaacaaaattctgaatcggccaaagaggtataattcaggtaaattggaagagtttgttcaagggaaccttgagagagaatgtatggaagaaaagtgtagttttgaagaagcacgagaagtttttgaaaacactgaaagaacaactgaattttggaagcagtatgttgatggagatcagtgtgagtccaatccatgtttaaatggcggcagttgcaaggatgacattaattcctatgaatgttggtgtccctttggatttgaaggaaagaactgtgaattagatgtaacatgtaacattaagaatggcagatgcgagcagttttgtaaaaatagtgctgataacaaggtggtttgctcctgtactgagggatatcgacttgcagaaaaccagaagtcctgtgaaccagcagtgccatttccatgtggaagagtttctgtttcacaaacttctaagctcacccgtgctgagactgtttttcctgatgtggactatgtaaattctactgaagctgaaaccattttggataacatcactcaaagcacccaatcatttaatgacttcactcgggttgttggtggagaagatgccaaaccaggtcaattcccttggcaggttgttttgaatggtaaagttgatgcattctgtggaggctctatcgttaatgaaaaatggattgtaactgctgcccactgtgttgaaactggtgttaaaattacagttgtcgcaggtgaacataatattgaggagacagaacatacagagcaaaagcgaaatgtgattcgaattattcctcaccacaactacaatgcagctattaataagtacaaccatgacattgcccttctggaactggacgaacccttagtgctaaacagctacgttacacctatttgcattgctgacaaggaatacacgaacatcttcctcaaatttggatctggctatgtaagtggctggggaagagtcttccacaaagggagatcagctttagttcttcagtaccttagagttccacttgttgaccgagccacatgtcttcgatctacaaagttcaccatctataacaacatgttctgtgctggcttccatgaaggaggtagagattcatgtcaaggagatagtgggggaccccatgttactgaagtggaagggaccagtttcttaactggaattattagctggggtgaagagtgtgcaatgaaaggcaaatatggaatatataccaaggtatcccggtatgtcaactggattaaggaaaaaacaaagctcacttaacctcgactgtgccttctagttgccagccatctgttgtttgcccctcccccgtgccttccttgaccctggaaggtgccactcccactgtcctttcctaataaaatgaggaaattgcatcgcattgtctgagtaggtgtcattctattctggggggtggggtggggcaggacagcaagggggaggattgggaagacaatagcaggcatgctggggatgcggtgggctctatggcttctgaggcggaaagaaccagctggggctctagggggtatccccaaaaaacctcccacacctccccctgaacctgaaacataaaatgaatgcaattgttgttgttaacttgtttattgcagcttataatggttacaaataaagcaatagcatcacaaatttcacaaataaagcatttttttcactgcattctagttgtggtttgtccaaactcatcaatgtatcttatcatgtctgtcaggtgagcttggtcttttctttgatccagttgacatatctggacaccttggtgtagatgccatatttgcccttcatggcacactcttctccccagctgatgatgcctgtcagaaagctggtgccttccacctctgtcacatgagggccaccactatctccctggcaggagtctctgccaccttcatggaacccagcacagaacatgttgttgtagatggtgaacttggtgcttctcagacaggtggctctatccaccaggggcactctcaggtactgcagcaccagggcagaccttcccttgtggaacactctaccccagccagacacatagccagagccaaacttcagaaagatgttggtgtactctttgtcagcaatgcagataggggtcacataggagttcaggaccaggggctcatccagctcaagcagggcaatgtcatggttgtacttgttgatggcagcattgtagttgtggtgagggatgatcctgatgacattcctcttttgctctgtgtgctctgtttcctcaatgttgtgctccccagccaccactgtgatcttgacccctgtttccacacagtgggcagctgtcacaatccacttctcattcacaatggagccaccacagaaggcatccactttgccattcagcaccacttgccaagggaactgtccaggcttggcatcttcccctccaacaactcttgtgaagtcattgaaggactgggtgctctgggtgatgttgtccaggatggtttcagcctctgtggagttcacatagtccacatcagggaacactgtctcagctctggtcagcttgctggtctgggacacagacactctgccacatggaaagggcacagcaggttcacagcttttctggttctcagccagtctgtagccctctgtgcaggagcacacaaccttgttgtcagcagagttcttgcagaactgttcacatctgccattcttgatgttgcaggtcacatccagttcacagttcttgccctcaaagccaaaggggcaccagcactcatagctgttgatgtcatccttgcagctgccaccattcaggcaggggttgctttcacactggtccccatccacatactgcttccagaactctgtggttctctctgtgttctcaaacacttccctggcctcttcaaagctgcacttctcttccatgcattccctttccaggttgccctgcacaaactcttccagcttgccagagttgtacctcttgggcctgttcaggatcttgttggcattctcatggtccaggaaaactgtggaaacagggagagaaaaaccacacaacatatttaaagattgatgaagacaactaactgtaatatgctgctttttgttcttctcttcactgacctaagagatct

SEQ ID NO: 105 - DNA, 3280 bp, synthetic construct
  misc_feature 1..3280: note = Synthetic
  source 1..3280: mol_type = other DNA
agatctcttaggtcagtgaagagaagaacaaaaagcagcatattacagttagttgtcttcatcaatctttaaatatgttgtgtggtttttctctccctgtttccacagtttttcttgatcatgaaaacgccaacaaaattctgaatcggccaaagaggtataattcaggtaaattggaagagtttgttcaagggaaccttgagagagaatgtatggaagaaaagtgtagttttgaagaagcacgagaagtttttgaaaacactgaaagaacaactgaattttggaagcagtatgttgatggagatcagtgtgagtccaatccatgtttaaatggcggcagttgcaaggatgacattaattcctatgaatgttggtgtccctttggatttgaaggaaagaactgtgaattagatgtaacatgtaacattaagaatggcagatgcgagcagttttgtaaaaatagtgctgataacaaggtggtttgctcctgtactgagggatatcgacttgcagaaaaccagaagtcctgtgaaccagcagtgccatttccatgtggaagagtttctgtttcacaaacttctaagctcacccgtgctgagactgtttttcctgatgtggactatgtaaattctactgaagctgaaaccattttggataacatcactcaaagcacccaatcatttaatgacttcactcgggttgttggtggagaagatgccaaaccaggtcaattcccttggcaggttgttttgaatggtaaagttgatgcattctgtggaggctctatcgttaatgaaaaatggattgtaactgctgcccactgtgttgaaactggtgttaaaattacagttgtcgcaggtgaacataatattgaggagacagaacatacagagcaaaagcgaaatgtgattcgaattattcctcaccacaactacaatgcagctattaataagtacaaccatgacattgcccttctggaactggacgaacccttagtgctaaacagctacgttacacctatttgcattgctgacaaggaatacacgaacatcttcctcaaatttggatctggctatgtaagtggctggggaagagtcttccacaaagggagatcagctttagttcttcagtaccttagagttccacttgttgaccgagccacatgtcttcgatctacaaagttcaccatctataacaacatgttctgtgctggcttccatgaaggaggtagagattcatgtcaaggagatagtgggggaccccatgttactgaagtggaagggaccagtttcttaactggaattattagctggggtgaagagtgtgcaatgaaaggcaaatatggaatatataccaaggtatcccggtatgtcaactggattaaggaaaaaacaaagctcacttaacctcgactgtgccttctagttgccagccatctgttgtttgcccctcccccgtgccttccttgaccctggaaggtgccactcccactgtcctttcctaataaaatgaggaaattgcatcgcattgtctgagtaggtgtcattctattctggggggtggggtggggcaggacagcaagggggaggattgggaagacaatagcaggcatgctggggatgcggtgggctctatggcttctgaggcggaaagaaccagctggggctctagggggtatccccaaaaaacctcccacacctccccctgaacctgaaacataaaatgaatgcaattgttgttgttaacttgtttattgcagcttataatggttacaaataaagcaatagcatcacaaatttcacaaataaagcatttttttcactgcattctagttgtggtttgtccaaactcatcaatgtatcttatcatgtctgtcaggtcagtttggttttttctttgatccagttcacatatctggacaccttggtgtagatgccatacttgcccttcatggcacattcctctccccagctgatgatgcctgtcaggaagctggtgccctccacctctgtcacatgtgggcctccagagtctccttggcagctgtctctgcctccctcatggaagccagcacagaacatgttgttgtagatggtgaacttggtgcttctcaggcaggtggctctgtccaccagggggactctcaggtattgcagcaccagggcagacctgcccttgtggaacactctgccccagccagacacatagccagagccaaacttcaggaagatgttggtgtactctttgtctgcaatgcagatgggggtaacatagctgttcagcaccagaggctcatcaagttccagcagggcaatgtcatggttgtacttgttgatggctgcattgtagttgtggtgagggatgatcctgatcacatttctcttctgctctgtgtgctctgtttcttctatgttgtgttcaccagccaccactgtgatcttgacacctgtttccacacagtgggcagctgtcacaatccatttttcattcacaatgctgcccccacagaaggcatccaccttgccattcagcaccacctgccatgggaactggccaggcttggcatcctctcctcccaccactctggtgaagtcattgaagctctgggtgctctgggtgatgttgtccaggatggtctcagcctcagtgctgttcacatagtccacatcagggaacactgtttcagccctggtcagcttggaggtctgggacacagacactctgccacaggggaaagggacagcaggttcacagctcttctggttttcagccagcctgtagccctctgtgcagctgcacaccaccttgttgtctgctgagttcttgcagaactgttcacatctgccattcttgatgttgcaggtgacatccagctcacagttcttgccctcaaagccaaaagggcaccagcactcatagctgttgatgtcatctttgcagctgcctccattcaggcaagggttgctctcacactggtctccatcaacatactgcttccagaactcagtggttctctctgtgttttcaaacacttctctggcttcctcaaagctgcacttctcttccatgcactccctctccaggttgccctgcacaaactcctccagcttgccactgttgtatctcttgggtctgttgaggatcttgttggcattctcatggtccaggaaaactgtggaaacagggagagaaaaaccacacaacatatttaaagattgatgaagacaactaactgtaatatgctgctttttgttcttctcttcactgacctaagagatct

SEQ ID NO: 106 - DNA, 3280 bp, synthetic construct
  misc_feature 1..3280: note = Synthetic
  source 1..3280: mol_type = other DNA
agatctcttaggtcagtgaagagaagaacaaaaagcagcatattacagttagttgtcttcatcaatctttaaatatgttgtgtggtttttctctccctgtttccacagtttttcttgatcatgaaaatgccaacaaaattctgaataggccaaagaggtataattcagggaaattggaagagtttgttcaagggaaccttgagagagaatgtatggaagaaaagtgtagttttgaagaagcaagagaagtttttgaaaacactgaaagaacaactgaattttggaagcagtatgttgatggagatcagtgcgagtccaatccatgtttaaatgggggcagttgcaaggatgacattaattcctatgaatgttggtgtccctttggatttgaaggaaagaactgtgaattagatgtaacatgtaacattaagaatggcagatgtgagcagttttgtaaaaatagtgctgataacaaggtggtttgctcctgtactgagggatatagacttgcagaaaaccagaagtcctgtgaaccagcagtgccatttccatgtggaagagtttctgtttcacaaacttctaagctcaccagagctgagactgtttttcctgatgtggactatgtaaattctactgaagctgaaaccattttggataacatcactcaaagcacccaatcatttaatgacttcactagggttgttggtggagaagatgccaaaccaggacaattcccttggcaggttgttttgaatggtaaagttgatgcattctgtggaggctctattgttaatgaaaaatggattgtaactgctgcccactgtgttgaaactggtgttaaaattacagttgtggcaggtgaacataatattgaggagacagaacatacagagcaaaagagaaatgtgattagaattattcctcaccacaactacaatgcagctattaataagtacaaccatgacattgcccttctggaactggatgaacccttagtgctaaacagctatgttacacctatttgcattgctgacaaggaatacaccaacatcttcctcaaatttggatctggctatgtaagtggctggggaagagtcttccacaaagggagatcagctttagttcttcagtaccttagagttccacttgttgacagagccacatgtcttaggtctacaaagttcaccatctataacaacatgttctgtgctggcttccatgaaggaggtagagattcatgtcaaggagatagtgggggaccccatgttactgaagtggaagggaccagtttcttaactggaattattagctggggtgaagagtgtgcaatgaaaggcaaatatggaatatataccaaggtatccaggtatgtcaactggattaaggaaaaaacaaagctcacttaacctctactgtgccttctagttgccagccatctgttgtttgcccctcccccttgccttccttgaccctggaaggtgccactcccactgtcctttcctaataaaatgaggaaattgcatcacattgtctgagtaggtgtcattctattctggggggtggggtggggcaggacagcaagggggaggattgggaagacaatagcaggcatgctggggatgcagtgggctctatggcttctgaggtggaaagaaccagctggggctctagggggtatccccaaaaaacctcccacacctccccctgaacctgaaacataaaatgaatgcaattgttgttgttaacttgtttattgcagcttataatggttacaaataaagcaatagcatcacaaatttcacaaataaagcatttttttcactgcattctagttgtggtttgtccaaactcatcaatgtatcttatcatgtctgtcaagtcagcttggttttctccttaatccagttcacatatctggatacttttgtgtagatcccatactttcccttcatagcacactcctcaccccagctgataatcccagtcaggaagctggttccctccacctcagtcacatggggacccccagaatctccctggcagctgtctctaccaccttcatggaaccctgcacagaacatattgttgtagattgtaaacttggtgctcctcaagcaggttgctctatccaccagaggcaccctcaaatactgcaataccagggcagacctgcctttatggaacaccctgccccagccagacacatatccagacccaaatttcaagaagatgttggtgtactctttatcagcaatacagatgggtgtcacatagctgttcaagaccaggggttcatccagttccaggagggcaatgtcatggttgtacttgttgatagcagcattgtagttgtggtgggggataatcctgatcacattcctcttctgctcagtgtgctcagtttcctcaatattgtgctctccagccaccacagtaatcttgactccagtttccacacagtgggctgcagtcacaatccacttctcatttacaattgaacctccacaaaaggcatccacttttccattgagcactacctgccaggggaactgcccaggcttggcatcctcccctcctaccaccctggtgaagtcattgaagctctgtgtgctctgagtgatattgtcaaggattgtctcagcctcagtgctattcacataatctacatcaggaaagactgtttcagccctagtcagcttgctggtttggctcacagacactctcccacagggaaaaggcactgcaggttcacagctcttctggttttcagccagcctatatccctcagtgcagctacagaccactttgttatcagcagaattcttgcaaaattgctcacacctgccattcttgatattacaggtcacatcaagctcacagtttttcccctcaaatccaaagggacaccaacattcatagctgttgatatcatctttacagctccccccattcaagcagggattgctctcacattgatcaccatccacatactgcttccaaaattcagttgttctctctgtattttcaaacacttctctggcttcctcaaagctgcacttctcttccatacactctctctccagattcccctgtacaaactcttcaagcttgccagagttatacctctttggtctattcagaattttgttggcattttcatgatcaagaaaaactgtggaaacagggagagaaaaaccacacaacatatttaaagattgatgaagacaactaactgtaatatgctgctttttgttcttctcttcactgacctaagagatct

SEQ ID NO: 107 - DNA, 3280 bp, synthetic construct
  misc_feature 1..3280: note = Synthetic
  source 1..3280: mol_type = other DNA
agatctcttaggtcagtgaagagaagaacaaaaagcagcatattacagttagttgtcttcatcaatctttaaatatgttgtgtggtttttctctccctgtttccacagtttttcttgatcatgaaaatgccaacaaaattctgaataggccaaagaggtataattcagggaaattggaagagtttgttcaagggaaccttgagagagaatgtatggaagaaaagtgtagttttgaagaagcaagagaagtttttgaaaacactgaaagaacaactgaattttggaagcagtatgttgatggagatcagtgcgagtccaatccatgtttaaatgggggcagttgcaaggatgacattaattcctatgaatgttggtgtccctttggatttgaaggaaagaactgtgaattagatgtaacatgtaacattaagaatggcagatgtgagcagttttgtaaaaatagtgctgataacaaggtggtttgctcctgtactgagggatatagacttgcagaaaaccagaagtcctgtgaaccagcagtgccatttccatgtggaagagtttctgtttcacaaacttctaagctcaccagagctgagactgtttttcctgatgtggactatgtaaattctactgaagctgaaaccattttggataacatcactcaaagcacccaatcatttaatgacttcactagggttgttggtggagaagatgccaaaccaggacaattcccttggcaggttgttttgaatggtaaagttgatgcattctgtggaggctctattgttaatgaaaaatggattgtaactgctgcccactgtgttgaaactggtgttaaaattacagttgtggcaggtgaacataatattgaggagacagaacatacagagcaaaagagaaatgtgattagaattattcctcaccacaactacaatgcagctattaataagtacaaccatgacattgcccttctggaactggatgaacccttagtgctaaacagctatgttacacctatttgcattgctgacaaggaatacaccaacatcttcctcaaatttggatctggctatgtaagtggctggggaagagtcttccacaaagggagatcagctttagttcttcagtaccttagagttccacttgttgacagagccacatgtcttaggtctacaaagttcaccatctataacaacatgttctgtgctggcttccatgaaggaggtagagattcatgtcaaggagatagtgggggaccccatgttactgaagtggaagggaccagtttcttaactggaattattagctggggtgaagagtgtgcaatgaaaggcaaatatggaatatataccaaggtatccaggtatgtcaactggattaaggaaaaaacaaagctcacttaacctctactgtgccttctagttgccagccatctgttgtttgcccctcccccttgccttccttgaccctggaaggtgccactcccactgtcctttcctaataaaatgaggaaattgcatcacattgtctgagtaggtgtcattctattctggggggtggggtggggcaggacagcaagggggaggattgggaagacaatagcaggcatgctggggatgcagtgggctctatggcttctgaggtggaaagaaccagctggggctctagggggtatccccaaaaaacctcccacacctccccctgaacctgaaacataaaatgaatgcaattgttgttgttaacttgtttattgcagcttataatggttacaaataaagcaatagcatcacaaatttcacaaataaagcatttttttcactgcattctagttgtggtttgtccaaactcatcaatgtatcttatcatgtctgtcaggtcagcttggtcttctccttgatccagttcacatacctgctcaccttggtgtagatgccatacttgcccttcatggcacactcctccccccagctgatgatgcctgtcaggaagctggtgccctccacctctgtcacatgggggcccccagagtctccctggcagctgtctctgcctccctcatggaagccagcacagaacatgttgttgtagatggtgaacttggtgctcctcaggcaggtggccctgtccaccaggggcactctcaggtactgcagcaccagggcagacctgcccttgtggaacactctgccccagccagacacatagccagagccaaacttcaggaagatgttggtgtactccttgtcagcaatgcagatgggggtcacatagctgttcagcaccaggggctcatccagctccagcagggcaatgtcatggttgtacttgttgatggcagcattgtagttgtggtgggggatgatcctgatcacattcctcttctgctctgtgtgctctgtctcctcaatgttgtgctccccagccaccactgtgatcttcacccctgtctccacacagtgggcagctgtcacaatccacttctcattcacaatgctgcctccacagaaggcatccaccttgccattcagcaccacctgccaggggaactggccaggcttggcatcctctccccccaccaccctggtgaagtcattgaagctctgggtgctctgggtgatgttgtccaggatggtctcagcctctgtgctgttcacatagtccacatcagggaacactgtctcagccctggtcagcttgctggtctggctcacagacactctgccacaggggaagggcacagcaggctcacagctcttctggttctcagccagcctgtagccctctgtgcagctgcacaccaccttgttgtcagcagagttcttgcagaactgctcacatctgccattcttgatgttgcaggtcacatccagctcacagttcttgccctcaaagccaaaggggcaccagcactcatagctgttgatgtcatccttgcagctgcctccattcaggcaggggttgctctcacactggtctccatccacatactgcttccagaactctgtggttctctctgtgttctcaaacacctccctggcctcctcaaagctgcacttctcctccatgcactctctctccaggttgccctgcacaaactcctccagcttgccagagttgtacctcttgggcctgttcaggatcttgttggcattctcatggtccaggaaaactgtggaaacagggagagaaaaaccacacaacatatttaaagattgatgaagacaactaactgtaatatgctgctttttgttcttctcttcactgacctaagagatct

SEQ ID NO: 108 - DNA, 3280 bp, synthetic construct
  misc_feature 1..3280: note = Synthetic
  misc_feature 9..108: note = Splice acceptor
  misc_feature 111..1406: note = F9 CDS #1 Native CpG Removed No Splice F9
  misc_feature 170: note = Cryptic splice donor site mutated
  misc_feature 311: note = Cryptic splice donor site mutated
  misc_feature 728: note = Cryptic splice donor site mutated
  misc_feature 1410..1411: note = CpG removed
  misc_feature 1413..1636: note = bGH pA with CpG sites removed
  misc_feature 1647..1648: note = CpG removed
  misc_feature 1744..1874: note = SV40 pA
  misc_feature 1875..3170: note = F9 CDS #2 (GA F9)
  misc_feature 3173..3272: note = Splice acceptor
  source 1..3280: mol_type = other DNA
agatctcttaggtcagtgaagagaagaacaaaaagcagcatattacagttagttgtcttcatcaatctttaaatatgttgtgtggtttttctctccctgtttccacagtttttcttgatcatgaaaatgccaacaaaattctgaataggccaaagaggtataattcagggaaattggaagagtttgttcaagggaaccttgagagagaatgtatggaagaaaagtgtagttttgaagaagcaagagaagtttttgaaaacactgaaagaacaactgaattttggaagcagtatgttgatggagatcagtgcgagtccaatccatgtttaaatgggggcagttgcaaggatgacattaattcctatgaatgttggtgtccctttggatttgaaggaaagaactgtgaattagatgtaacatgtaacattaagaatggcagatgtgagcagttttgtaaaaatagtgctgataacaaggtggtttgctcctgtactgagggatatagacttgcagaaaaccagaagtcctgtgaaccagcagtgccatttccatgtggaagagtttctgtttcacaaacttctaagctcaccagagctgagactgtttttcctgatgtggactatgtaaattctactgaagctgaaaccattttggataacatcactcaaagcacccaatcatttaatgacttcactagggttgttggtggagaagatgccaaaccaggacaattcccttggcaggttgttttgaatggtaaagttgatgcattctgtggaggctctattgttaatgaaaaatggattgtaactgctgcccactgtgttgaaactggtgttaaaattacagttgtggcaggtgaacataatattgaggagacagaacatacagagcaaaagagaaatgtgattagaattattcctcaccacaactacaatgcagctattaataagtacaaccatgacattgcccttctggaactggatgaacccttagtgctaaacagctatgttacacctatttgcattgctgacaaggaatacaccaacatcttcctcaaatttggatctggctatgtaagtggctggggaagagtcttccacaaagggagatcagctttagttcttcagtaccttagagttccacttgttgacagagccacatgtcttaggtctacaaagttcaccatctataacaacatgttctgtgctggcttccatgaaggaggtagagattcatgtcaaggagatagtgggggaccccatgttactgaagtggaagggaccagtttcttaactggaattattagctggggtgaagagtgtgcaatgaaaggcaaatatggaatatataccaaggtatccaggtatgtcaactggattaaggaaaaaacaaagctcacttaacctctactgtgccttctagttgccagccatctgttgtttgcccctcccccttgccttccttgaccctggaaggtgccactcccactgtcctttcctaataaaatgaggaaattgcatcacattgtctgagtaggtgtcattctattctggggggtggggtggggcaggacagcaagggggaggattgggaagacaatagcaggcatgctggggatgcagtgggctctatggcttctgaggtggaaagaaccagctggggctctagggggtatccccaaaaaacctcccacacctccccctgaacctgaaacataaaatgaatgcaattgttgttgttaacttgtttattgcagcttataatggttacaaataaagcaatagcatcacaaatttcacaaataaagcatttttttcactgcattctagttgtggtttgtccaaactcatcaatgtatcttatcatgtctgtcaggtgagcttggtcttttctttgatccagttgacatatctggacaccttggtgtagatgccatatttgcccttcatggcacactcttctccccagctgatgatgcctgtcagaaagctggtgccttccacctctgtcacatgagggccaccactatctccctggcaggagtctctgccaccttcatggaacccagcacagaacatgttgttgtagatggtgaacttggtgcttctcagacaggtggctctatccaccaggggcactctcaggtactgcagcaccagggcagaccttcccttgtggaacactctaccccagccagacacatagccagagccaaacttcagaaagatgttggtgtactctttgtcagcaatgcagataggggtcacataggagttcaggaccaggggctcatccagctcaagcagggcaatgtcatggttgtacttgttgatggcagcattgtagttgtggtgagggatgatcctgatgacattcctcttttgctctgtgtgctctgtttcctcaatgttgtgctccccagccaccactgtgatcttgacccctgtttccacacagtgggcagctgtcacaatccacttctcattcacaatggagccaccacagaaggcatccactttgccattcagcaccacttgccaagggaactgtccaggcttggcatcttcccctccaacaactcttgtgaagtcattgaaggactgggtgctctgggtgatgttgtccaggatggtttcagcctctgtggagttcacatagtccacatcagggaacactgtctcagctctggtcagcttgctggtctgggacacagacactctgccacatggaaagggcacagcaggttcacagcttttctggttctcagccagtctgtagccctctgtgcaggagcacacaaccttgttgtcagcagagttcttgcagaactgttcacatctgccattcttgatgttgcaggtcacatccagttcacagttcttgccctcaaagccaaaggggcaccagcactcatagctgttgatgtcatccttgcagctgccaccattcaggcaggggttgctttcacactggtccccatccacatactgcttccagaactctgtggttctctctgtgttctcaaacacttccctggcctcttcaaagctgcacttctcttccatgcattccctttccaggttgccctgcacaaactcttccagcttgccagagttgtacctcttgggcctgttcaggatcttgttggcattctcatggtccaggaaaactgtggaaacagggagagaaaaaccacacaacatatttaaagattgatgaagacaactaactgtaatatgctgctttttgttcttctcttcactgacctaagagatct

SEQ ID NO: 109 - DNA, 3280 bp, synthetic construct
  misc_feature 1..3280: note = Synthetic
  misc_feature 9..108: note = Splice acceptor
  misc_feature 111..1406: note = F9 CDS #1 Native CpG Removed No Splice F9
  misc_feature 170: note = Cryptic splice donor site mutated
  misc_feature 311: note = Cryptic splice donor site mutated
  misc_feature 728: note = Cryptic splice donor site mutated
  misc_feature 1410..1411: note = CpG removed
  misc_feature 1413..1636: note = bGH pA with CpG sites removed
  misc_feature 1647..1648: note = CpG removed
  misc_feature 1744..1874: note = SV40 pA
  misc_feature 1875..3170: note = F9 CDS #2 (CpG0 F9)
  misc_feature 3173..3272: note = Splice acceptor
  source 1..3280: mol_type = other DNA
agatctcttaggtcagtgaagagaagaacaaaaagcagcatattacagttagttgtcttcatcaatctttaaatatgttgtgtggtttttctctccctgtttccacagtttttcttgatcatgaaaatgccaacaaaattctgaataggccaaagaggtataattcagggaaattggaagagtttgttcaagggaaccttgagagagaatgtatggaagaaaagtgtagttttgaagaagcaagagaagtttttgaaaacactgaaagaacaactgaattttggaagcagtatgttgatggagatcagtgcgagtccaatccatgtttaaatgggggcagttgcaaggatgacattaattcctatgaatgttggtgtccctttggatttgaaggaaagaactgtgaattagatgtaacatgtaacattaagaatggcagatgtgagcagttttgtaaaaatagtgctgataacaaggtggtttgctcctgtactgagggatatagacttgcagaaaaccagaagtcctgtgaaccagcagtgccatttccatgtggaagagtttctgtttcacaaacttctaagctcaccagagctgagactgtttttcctgatgtggactatgtaaattctactgaagctgaaaccattttggataacatcactcaaagcacccaatcatttaatgacttcactagggttgttggtggagaagatgccaaaccaggacaattcccttggcaggttgttttgaatggtaaagttgatgcattctgtggaggctctattgttaatgaaaaatggattgtaactgctgcccactgtgttgaaactggtgttaaaattacagttgtggcaggtgaacataatattgaggagacagaacatacagagcaaaagagaaatgtgattagaattattcctcaccacaactacaatgcagctattaataagtacaaccatgacattgcccttctggaactggatgaacccttagtgctaaacagctatgttacacctatttgcattgctgacaaggaatacaccaacatcttcctcaaatttggatctggctatgtaagtggctggggaagagtcttccacaaagggagatcagctttagttcttcagtaccttagagttccacttgttgacagagccacatgtcttaggtctacaaagttcaccatctataacaacatgttctgtgctggcttccatgaaggaggtagagattcatgtcaaggagatagtgggggaccccatgttactgaagtggaagggaccagtttcttaactggaattattagctggggtgaagagtgtgcaatgaaaggcaaatatggaatatataccaaggtatccaggtatgtcaactggattaaggaaaaaacaaagctcacttaacctctactgtgccttctagttgccagccatctgttgtttgcccctcccccttgccttccttgaccctggaaggtgccactcccactgtcctttcctaataaaatgaggaaattgcatcacattgtctgagtaggtgtcattctattctggggggtggggtggggcaggacagcaagggggaggattgggaagacaatagcaggcatgctggggatgcagtgggctctatggcttctgaggtggaaagaaccagctggggctctagggggtatccccaaaaaacctcccacacctccccctgaacctgaaacataaaatgaatgcaattgttgttgttaacttgtttattgcagcttataatggttacaaataaagcaatagcatcacaaatttcacaaataaagcatttttttcactgcattctagttgtggtttgtccaaactcatcaatgtatcttatcatgtctgtcaggtcagtttggttttttctttgatccagttcacatatctggacaccttggtgtagatgccatacttgcccttcatggcacattcctctccccagctgatgatgcctgtcaggaagctggtgccctccacctctgtcacatgtgggcctccagagtctccttggcagctgtctctgcctccctcatggaagccagcacagaacatgttgttgtagatggtgaacttggtgcttctcaggcaggtggctctgtccaccagggggactctcaggtattgcagcaccagggcagacctgcccttgtggaacactctgccccagccagacacatagccagagccaaacttcaggaagatgttggtgtactctttgtctgcaatgcagatgggggtaacatagctgttcagcaccagaggctcatcaagttccagcagggcaatgtcatggttgtacttgttgatggctgcattgtagttgtggtgagggatgatcctgatcacatttctcttctgctctgtgtgctctgtttcttctatgttgtgttcaccagccaccactgtgatcttgacacctgtttccacacagtgggcagctgtcacaatccatttttcattcacaatgctgcccccacagaaggcatccaccttgccattcagcaccacctgccatgggaactggccaggcttggcatcctctcctcccaccactctggtgaagtcattgaagctctgggtgctctgggtgatgttgtccaggatggtctcagcctcagtgctgttcacatagtccacatcagggaacactgtttcagccctggtcagcttggaggtctgggacacagacactctgccacaggggaaagggacagcaggttcacagctcttctggttttcagccagcctgtagccctctgtgcagctgcacaccaccttgttgtctgctgagttcttgcagaactgttcacatctgccattcttgatgttgcaggtgacatccagctcacagttcttgccctcaaagccaaaagggcaccagcactcatagctgttgatgtcatctttgcagctgcctccattcaggcaagggttgctctcacactggtctccatcaacatactgcttccagaactcagtggttctctctgtgttttcaaacacttctctggcttcctcaaagctgcacttctcttccatgcactccctctccaggttgccctgcacaaactcctccagcttgccactgttgtatctcttgggtctgttgaggatcttgttggcattctcatggtccaggaaaactgtggaaacagggagagaaaaaccacacaacatatttaaagattgatgaagacaactaactgtaatatgctgctttttgttcttctcttcactgacctaagagatct

SEQ ID NO: 110 - DNA, 3280 bp, synthetic construct
  misc_feature 1..3280: note = Synthetic
  source 1..3280: mol_type = other DNA
agatctcttaggtcagtgaagagaagaacaaaaagcagcatattacagttagttgtcttcatcaatctttaaatatgttgtgtggtttttctctccctgtttccacagtttttcttgatcatgaaaatgccaacaaaattctgaataggccaaagaggtataattcagggaaattggaagagtttgttcaagggaaccttgagagagaatgtatggaagaaaagtgtagttttgaagaagcaagagaagtttttgaaaacactgaaagaacaactgaattttggaagcagtatgttgatggagatcagtgcgagtccaatccatgtttaaatgggggcagttgcaaggatgacattaattcctatgaatgttggtgtccctttggatttgaaggaaagaactgtgaattagatgtaacatgtaacattaagaatggcagatgtgagcagttttgtaaaaatagtgctgataacaaggtggtttgctcctgtactgagggatatagacttgcagaaaaccagaagtcctgtgaaccagcagtgccatttccatgtggaagagtttctgtttcacaaacttctaagctcaccagagctgagactgtttttcctgatgtggactatgtaaattctactgaagctgaaaccattttggataacatcactcaaagcacccaatcatttaatgacttcactagggttgttggtggagaagatgccaaaccaggacaattcccttggcaggttgttttgaatggtaaagttgatgcattctgtggaggctctattgttaatgaaaaatggattgtaactgctgcccactgtgttgaaactggtgttaaaattacagttgtggcaggtgaacataatattgaggagacagaacatacagagcaaaagagaaatgtgattagaattattcctcaccacaactacaatgcagctattaataagtacaaccatgacattgcccttctggaactggatgaacccttagtgctaaacagctatgttacacctatttgcattgctgacaaggaatacaccaacatcttcctcaaatttggatctggctatgtaagtggctggggaagagtcttccacaaagggagatcagctttagttcttcagtaccttagagttccacttgttgacagagccacatgtcttaggtctacaaagttcaccatctataacaacatgttctgtgctggcttccatgaaggaggtagagattcatgtcaaggagatagtgggggaccccatgttactgaagtggaagggaccagtttcttaactggaattattagctggggtgaagagtgtgcaatgaaaggcaaatatggaatatataccaaggtatccaggtatgtcaactggattaaggaaaaaacaaagctcacttaacctctactgtgccttctagttgccagccatctgttgtttgcccctcccccttgccttccttgaccctggaaggtgccactcccactgtcctttcctaataaaatgaggaaattgcatcacattgtctgagtaggtgtcattctattctggggggtggggtggggcaggacagcaagggggaggattgggaagacaatagcaggcatgctggggatgcagtgggctctatggcttctgaggtggaaagaaccagctggggctctagggggtatccccaaaaaacctcccacacctccccctgaacctgaaacataaaatgaatgcaattgttgttgttaacttgtttattgcagcttataatggttacaaataaagcaatagcatcacaaatttcacaaataaagcatttttttcactgcattctagttgtggtttgtccaaactcatcaatgtatcttatcatgtctgttaggtgagcttagtcttttcttttatccaattcacgtagcgagagaccttcgtatagatgccatatttccccttcatcgcacattcctccccccaacttattatcccggtcaagaaacttgttccttcgacttcagtgacgtgtggtccacctgaatcaccttggcatgagtcgcgaccgccctcgtgaaacccagcacaaaacatgttattgtaaatcgtaaatttcgtggaccgaagacaggtcgctctatcgaccaacgggacgcgcaaatattgcagaacgagggctgaccgacctttgtggaagacccgcccccacccactcacatatccgctcccaaatttcaagaagatatttgtatattctttatcggctatacaaatcggggtaacataggagttaagtacgagtggctcgtccagctccaggagggctatatcatggttgtacttgtttatagcggcattataattgtgatggggtatgatcctgataacattccttttctgttcagtatgctcagtttcttcaatgttgtgttcgccagccacgaccgtaatcttaacccccgtctcgacacagtgtgcggccgttacaatccacttttcattgactatggagcccccacaaaacgcgtcgacttttccgttgagcaccacctgccatggaaattggccaggtttagcgtcctcgcccccgacaaccctagtaaagtcattaaatgactgtgtggattgtgttatattatcaagaatcgtttcggcttcagtagagttaacgtagtccacatcgggaaaaactgtctcggcccttgtcaactttgatgtctgggacacacttacccgaccgcacgggaagggcaccgccggttcacagctcttttgattctcagcgagccggtagccctcagtgcaactacacacaactttgttgtcggcggaatttttacagaattgctcgcatcgtccatttttaatgttgcaggtgacgtccaactcgcagttttttccttcaaaaccaaaagggcaccaacactcgtaggaatttatatcgtctttacaactccccccattcagacatggattagattcgcattggtccccatcgacatattgcttccagaactcagtggtccgttctgtattctcaaacacctcgcgcgcttcttcaaaactgcatttttcctccatacactctcgctccaagttcccttgcacgaattcttcaagctttcctgagttataccttttaggccggttaagtatcttattcgcgttttcgtggtccagaaaaactgtggaaacagggagagaaaaaccacacaacatatttaaagattgatgaagacaactaactgtaatatgctgctttttgttcttctcttcactgacctaagagatct

SEQ ID NO: 111 - DNA, 3280 bp, synthetic construct
  misc_feature 1..3280: note = Synthetic
  source 1..3280: mol_type = other DNA
agatctcttaggtcagtgaagagaagaacaaaaagcagcatattacagttagttgtcttcatcaatctttaaatatgttgtgtggtttttctctccctgtttccacagtttttcttgatcatgaaaatgccaacaaaattctgaataggccaaagaggtataattcaggtaaattggaagagtttgttcaagggaaccttgagagagaatgtatggaagaaaagtgtagttttgaagaagcaagagaagtttttgaaaacactgaaagaacaactgaattttggaagcagtatgttgatggagatcagtgtgagtccaatccatgtttaaatgggggcagttgcaaggatgacattaattcctatgaatgttggtgtccctttggatttgaaggaaagaactgtgaattagatgtaacatgtaacattaagaatggcagatgtgagcagttttgtaaaaatagtgctgataacaaggtggtttgctcctgtactgagggatatagacttgcagaaaaccagaagtcctgtgaaccagcagtgccatttccatgtggaagagtttctgtttcacaaacttctaagctcaccagagctgagactgtttttcctgatgtggactatgtaaattctactgaagctgaaaccattttggataacatcactcaaagcacccaatcatttaatgacttcactagggttgttggtggagaagatgccaaaccaggtcaattcccttggcaggttgttttgaatggtaaagttgatgcattctgtggaggctctattgttaatgaaaaatggattgtaactgctgcccactgtgttgaaactggtgttaaaattacagttgtggcaggtgaacataatattgaggagacagaacatacagagcaaaagagaaatgtgattagaattattcctcaccacaactacaatgcagctattaataagtacaaccatgacattgcccttctggaactggatgaacccttagtgctaaacagctatgttacacctatttgcattgctgacaaggaatacaccaacatcttcctcaaatttggatctggctatgtaagtggctggggaagagtcttccacaaagggagatcagctttagttcttcagtaccttagagttccacttgttgacagagccacatgtcttaggtctacaaagttcaccatctataacaacatgttctgtgctggcttccatgaaggaggtagagattcatgtcaaggagatagtgggggaccccatgttactgaagtggaagggaccagtttcttaactggaattattagctggggtgaagagtgtgcaatgaaaggcaaatatggaatatataccaaggtatccaggtatgtcaactggattaaggaaaaaacaaagctcacttaacctctactgtgccttctagttgccagccatctgttgtttgcccctcccccttgccttccttgaccctggaaggtgccactcccactgtcctttcctaataaaatgaggaaattgcatcacattgtctgagtaggtgtcattctattctggggggtggggtggggcaggacagcaagggggaggattgggaagacaatagcaggcatgctggggatgcagtgggctctatggcttctgaggtggaaagaaccagctggggctctagggggtatccccaaaaaacctcccacacctccccctgaacctgaaacataaaatgaatgcaattgttgttgttaacttgtttattgcagcttataatggttacaaataaagcaatagcatcacaaatttcacaaataaagcatttttttcactgcattctagttgtggtttgtccaaactcatcaatgtatcttatcatgtctgttaggtgagcttagtcttttcttttatccaattcacgtagcgagagaccttcgtatagatgccatatttccccttcatcgcacattcctccccccaacttattatcccggtcaagaaacttgttccttcgacttcagtgacgtgtggtccacctgaatcaccttggcatgagtcgcgaccgccctcgtgaaacccagcacaaaacatgttattgtaaatcgtaaatttcgtggaccgaagacaggtcgctctatcgaccaacgggacgcgcaaatattgcagaacgagggctgaccgacctttgtggaagacccgcccccacccactcacatatccgctcccaaatttcaagaagatatttgtatattctttatcggctatacaaatcggggtaacataggagttaagtacgagtggctcgtccagctccaggagggctatatcatggttgtacttgtttatagcggcattataattgtgatggggtatgatcctgataacattccttttctgttcagtatgctcagtttcttcaatgttgtgttcgccagccacgaccgtaatcttaacccccgtctcgacacagtgtgcggccgttacaatccacttttcattgactatggagcccccacaaaacgcgtcgacttttccgttgagcaccacctgccatggaaattggccaggtttagcgtcctcgcccccgacaaccctagtaaagtcattaaatgactgtgtggattgtgttatattatcaagaatcgtttcggcttcagtagagttaacgtagtccacatcgggaaaaactgtctcggcccttgtcaactttgatgtctgggacacacttacccgaccgcacgggaagggcaccgccggttcacagctcttttgattctcagcgagccggtagccctcagtgcaactacacacaactttgttgtcggcggaatttttacagaattgctcgcatcgtccatttttaatgttgcaggtgacgtccaactcgcagttttttccttcaaaaccaaaagggcaccaacactcgtaggaatttatatcgtctttacaactccccccattcagacatggattagattcgcattggtccccatcgacatattgcttccagaactcagtggtccgttctgtattctcaaacacctcgcgcgcttcttcaaaactgcatttttcctccatacactctcgctccaagttcccttgcacgaattcttcaagctttcctgagttataccttttaggccggttaagtatcttattcgcgttttcgtggtccagaaaaactgtggaaacagggagagaaaaaccacacaacatatttaaagattgatgaagacaactaactgtaatatgctgctttttgttcttctcttcactgacctaagagatct

SEQ ID NO: 112 - DNA, 3280 bp, synthetic construct
  misc_feature 1..3280: note = Synthetic
  source 1..3280: mol_type = other DNA
agatctcttaggtcagtgaagagaagaacaaaaagcagcatattacagttagttgtcttcatcaatctttaaatatgttgtgtggtttttctctccctgtttccacagtttttcttgatcatgaaaacgccaacaaaattctgaatcggccaaagaggtataattcaggtaaattggaagagtttgttcaagggaaccttgagagagaatgtatggaagaaaagtgtagttttgaagaagcacgagaagtttttgaaaacactgaaagaacaactgaattttggaagcagtatgttgatggagatcagtgtgagtccaatccatgtttaaatggcggcagttgcaaggatgacattaattcctatgaatgttggtgtccctttggatttgaaggaaagaactgtgaattagatgtaacatgtaacattaagaatggcagatgcgagcagttttgtaaaaatagtgctgataacaaggtggtttgctcctgtactgagggatatcgacttgcagaaaaccagaagtcctgtgaaccagcagtgccatttccatgtggaagagtttctgtttcacaaacttctaagctcacccgtgctgagactgtttttcctgatgtggactatgtaaattctactgaagctgaaaccattttggataacatcactcaaagcacccaatcatttaatgacttcactcgggttgttggtggagaagatgccaaaccaggtcaattcccttggcaggttgttttgaatggtaaagttgatgcattctgtggaggctctatcgttaatgaaaaatggattgtaactgctgcccactgtgttgaaactggtgttaaaattacagttgtcgcaggtgaacataatattgaggagacagaacatacagagcaaaagcgaaatgtgattcgaattattcctcaccacaactacaatgcagctattaataagtacaaccatgacattgcccttctggaactggacgaacccttagtgctaaacagctacgttacacctatttgcattgctgacaaggaatacacgaacatcttcctcaaatttggatctggctatgtaagtggctggggaagagtcttccacaaagggagatcagctttagttcttcagtaccttagagttccacttgttgaccgagccacatgtcttcgatctacaaagttcaccatctataacaacatgttctgtgctggcttccatgaaggaggtagagattcatgtcaaggagatagtgggggaccccatgttactgaagtggaagggaccagtttcttaactggaattattagctggggtgaagagtgtgcaatgaaaggcaaatatggaatatataccaaggtatcccggtatgtcaactggattaaggaaaaaacaaagctcacttaacctctactgtgccttctagttgccagccatctgttgtttgcccctcccccttgccttccttgaccctggaaggtgccactcccactgtcctttcctaataaaatgaggaaattgcatcacattgtctgagtaggtgtcattctattctggggggtggggtggggcaggacagcaagggggaggattgggaagacaatagcaggcatgctggggatgcagtgggctctatggcttctgaggtggaaagaaccagctggggctctagggggtatccccaaaaaacctcccacacctccccctgaacctgaaacataaaatgaatgcaattgttgttgttaacttgtttattgcagcttataatggttacaaataaagcaatagcatcacaaatttcacaaataaagcatttttttcactgcattctagttgtggtttgtccaaactcatcaatgtatcttatcatgtctgttaggtgagcttagtcttttcttttatccaattcacgtagcgagagaccttcgtatagatgccatatttccccttcatcgcacattcctccccccaacttattatcccggtcaagaaacttgttccttcgacttcagtgacgtgtggtccacctgaatcaccttggcatgagtcgcgaccgccctcgtgaaacccagcacaaaacatgttattgtaaatcgtaaatttcgtggaccgaagacaggtcgctctatcgaccaacgggacgcgcaaatattgcagaacgagggctgaccgacctttgtggaagacccgcccccacccactcacatatccgctcccaaatttcaagaagatatttgtatattctttatcggctatacaaatcggggtaacataggagttaagtacgagtggctcgtccagctccaggagggctatatcatggttgtacttgtttatagcggcattataattgtgatggggtatgatcctgataacattccttttctgttcagtatgctcagtttcttcaatgttgtgttcgccagccacgaccgtaatcttaacccccgtctcgacacagtgtgcggccgttacaatccacttttcattgactatggagcccccacaaaacgcgtcgacttttccgttgagcaccacctgccatggaaattggccaggtttagcgtcctcgcccccgacaaccctagtaaagtcattaaatgactgtgtggattgtgttatattatcaagaatcgtttcggcttcagtagagttaacgtagtccacatcgggaaaaactgtctcggcccttgtcaactttgatgtctgggacacacttacccgaccgcacgggaagggcaccgccggttcacagctcttttgattctcagcgagccggtagccctcagtgcaactacacacaactttgttgtcggcggaatttttacagaattgctcgcatcgtccatttttaatgttgcaggtgacgtccaactcgcagttttttccttcaaaaccaaaagggcaccaacactcgtaggaatttatatcgtctttacaactccccccattcagacatggattagattcgcattggtccccatcgacatattgcttccagaactcagtggtccgttctgtattctcaaacacctcgcgcgcttcttcaaaactgcatttttcctccatacactctcgctccaagttcccttgcacgaattcttcaagctttcctgagttataccttttaggccggttaagtatcttattcgcgttttcgtggtccagaaaaactgtggaaacagggagagaaaaaccacacaacatatttaaagattgatgaagacaactaactgtaatatgctgctttttgttcttctcttcactgacctaagagatct

SEQ ID NO: 113 - DNA, 3280 bp, synthetic construct
  misc_feature 1..3280: note = Synthetic
  source 1..3280: mol_type = other DNA
agatctcttaggtcagtgaagagaagaacaaaaagcagcatattacagttagttgtcttcatcaatctttaaatatgttgtgtggtttttctctccctgtttccacagtttttcttgatcatgaaaacgccaacaaaattctgaatcggccaaagaggtataattcagggaaattggaagagtttgttcaagggaaccttgagagagaatgtatggaagaaaagtgtagttttgaagaagcacgagaagtttttgaaaacactgaaagaacaactgaattttggaagcagtatgttgatggagatcagtgcgagtccaatccatgtttaaatggcggcagttgcaaggatgacattaattcctatgaatgttggtgtccctttggatttgaaggaaagaactgtgaattagatgtaacatgtaacattaagaatggcagatgcgagcagttttgtaaaaatagtgctgataacaaggtggtttgctcctgtactgagggatatcgacttgcagaaaaccagaagtcctgtgaaccagcagtgccatttccatgtggaagagtttctgtttcacaaacttctaagctcacccgtgctgagactgtttttcctgatgtggactatgtaaattctactgaagctgaaaccattttggataacatcactcaaagcacccaatcatttaatgacttcactcgggttgttggtggagaagatgccaaaccaggacaattcccttggcaggttgttttgaatggtaaagttgatgcattctgtggaggctctatcgttaatgaaaaatggattgtaactgctgcccactgtgttgaaactggtgttaaaattacagttgtcgcaggtgaacataatattgaggagacagaacatacagagcaaaagcgaaatgtgattcgaattattcctcaccacaactacaatgcagctattaataagtacaaccatgacattgcccttctggaactggacgaacccttagtgctaaacagctacgttacacctatttgcattgctgacaaggaatacacgaacatcttcctcaaatttggatctggctatgtaagtggctggggaagagtcttccacaaagggagatcagctttagttcttcagtaccttagagttccacttgttgaccgagccacatgtcttcgatctacaaagttcaccatctataacaacatgttctgtgctggcttccatgaaggaggtagagattcatgtcaaggagatagtgggggaccccatgttactgaagtggaagggaccagtttcttaactggaattattagctggggtgaagagtgtgcaatgaaaggcaaatatggaatatataccaaggtatcccggtatgtcaactggattaaggaaaaaacaaagctcacttaacctcgactgtgccttctagttgccagccatctgttgtttgcccctcccccgtgccttccttgaccctggaaggtgccactcccactgtcctttcctaataaaatgaggaaattgcatcgcattgtctgagtaggtgtcattctattctggggggtggggtggggcaggacagcaagggggaggattgggaagacaatagcaggcatgctggggatgcggtgggctctatggcttctgaggcggaaagaaccagctggggctctagggggtatccccaaaaaacctcccacacctccccctgaacctgaaacataaaatgaatgcaattgttgttgttaacttgtttattgcagcttataatggttacaaataaagcaatagcatcacaaatttcacaaataaagcatttttttcactgcattctagttgtggtttgtccaaactcatcaatgtatcttatcatgtctgttaggtgagcttagtcttttcttttatccaattcacgtagcgagagaccttcgtatagatgccatatttccccttcatcgcacattcctccccccaacttattatcccggtcaagaaacttgttccttcgacttcagtgacgtgtggtccacctgaatcaccttggcatgagtcgcgaccgccctcgtgaaacccagcacaaaacatgttattgtaaatcgtaaatttcgtggaccgaagacaggtcgctctatcgaccaacgggacgcgcaaatattgcagaacgagggctgatcgacctttgtggaagacccgcccccacccactcacatatccgctcccaaatttcaagaagatatttgtatattctttatcggctatacaaatcggggtaacataggagttaagtacgagtggctcgtccagctccaggagggctatatcatggttgtacttgtttatagcggcattataattgtgatggggtatgatcctgataacattccttttctgttcagtatgctcagtttcttcaatgttgtgttcgccagccacgaccgtaatcttaacccccgtctcgacacagtgtgcggccgttacaatccacttttcattgactatggagcccccacaaaacgcgtcgacttttccgttgagcaccacctgccatggaaattggccaggtttagcgtcctcgcccccgacaaccctagtaaagtcattaaatgactgtgtggattgtgttatattatcaagaatcgtttcggcttcagtagagttaacgtagtccacatcgggaaaaactgtctcggcccttgtcaactttgatgtctgggacacacttacccgaccgcacgggaagggcaccgccggttcacagctcttttgattctcagcgagccggtagccctcagtgcaactacacacaactttgttgtcggcggaatttttacagaattgctcgcatcgtccatttttaatgttgcaggtgacgtccaactcgcagttttttccttcaaaaccaaaagggcaccaacactcgtaggaatttatatcgtctttacaactccccccattcagacatggattagattcgcattggtccccatcgacatattgcttccagaactcagtggtccgttctgtattctcaaacacctcgcgcgcttcttcaaaactgcatttttcctccatacactctcgctccaagttcccttgcacgaattcttcaagctttcctgagttataccttttaggccggttaagtatcttattcgcgttttcgtggtccagaaaaactgtggaaacagggagagaaaaaccacacaacatatttaaagattgatgaagacaactaactgtaatatgctgctttttgttcttctcttcactgacctaagagatct

SEQ ID NO: 114 - DNA, 3280 bp, synthetic construct
  misc_feature 1..3280: note = Synthetic
  source 1..3280: mol_type = other DNA
agatctcttaggtcagtgaagagaagaacaaaaagcagcatattacagttagttgtcttcatcaatctttaaatatgttgtgtggtttttctctccctgtttccacagtttttcttgatcatgaaaacgccaacaaaattctgaatcggccaaagaggtataattcaggtaaattggaagagtttgttcaagggaaccttgagagagaatgtatggaagaaaagtgtagttttgaagaagcacgagaagtttttgaaaacactgaaagaacaactgaattttggaagcagtatgttgatggagatcagtgtgagtccaatccatgtttaaatggcggcagttgcaaggatgacattaattcctatgaatgttggtgtccctttggatttgaaggaaagaactgtgaattagatgtaacatgtaacattaagaatggcagatgcgagcagttttgtaaaaatagtgctgataacaaggtggtttgctcctgtactgagggatatcgacttgcagaaaaccagaagtcctgtgaaccagcagtgccatttccatgtggaagagtttctgtttcacaaacttctaagctcacccgtgctgagactgtttttcctgatgtggactatgtaaattctactgaagctgaaaccattttggataacatcactcaaagcacccaatcatttaatgacttcactcgggttgttggtggagaagatgccaaaccaggtcaattcccttggcaggttgttttgaatggtaaagttgatgcattctgtggaggctctatcgttaatgaaaaatggattgtaactgctgcccactgtgttgaaactggtgttaaaattacagttgtcgcaggtgaacataatattgaggagacagaacatacagagcaaaagcgaaatgtgattcgaattattcctcaccacaactacaatgcagctattaataagtacaaccatgacattgcccttctggaactggacgaacccttagtgctaaacagctacgttacacctatttgcattgctgacaaggaatacacgaacatcttcctcaaatttggatctggctatgtaagtggctggggaagagtcttccacaaagggagatcagctttagttcttcagtaccttagagttccacttgttgaccgagccacatgtcttcgatctacaaagttcaccatctataacaacatgttctgtgctggcttccatgaaggaggtagagattcatgtcaaggagatagtgggggaccccatgttactgaagtggaagggaccagtttcttaactggaattattagctggggtgaagagtgtgcaatgaaaggcaaatatggaatatataccaaggtatcccggtatgtcaactggattaaggaaaaaacaaagctcacttaacctcgactgtgccttctagttgccagccatctgttgtttgcccctcccccgtgccttccttgaccctggaaggtgccactcccactgtcctttcctaataaaatgaggaaattgcatcgcattgtctgagtaggtgtcattctattctggggggtggggtggggcaggacagcaagggggaggattgggaagacaatagcaggcatgctggggatgcggtgggctctatggcttctgaggcggaaagaaccagctggggctctagggggtatccccaaaaaacctcccacacctccccctgaacctgaaacataaaatgaatgcaattgttgttgttaacttgtttattgcagcttataatggttacaaataaagcaatagcatcacaaatttcacaaataaagcatttttttcactgcattctagttgtggtttgtccaaactcatcaatgtatcttatcatgtctgtcaggtcagtttggttttttctttgatccagttcacatatctggacaccttggtgtagatgccatacttgcccttcatggcacattcctctccccagctgatgatgcctgtcaggaagctggtgccctccacctctgtcacgtgtgggcctccagagtctccttggcagctgtctctgcctccctcatggaagccagcacagaacatgttgttgtagatggtgaacttggtgcttctcaggcaggtggctctgtccaccagggggactctcaggtattgcagcaccagggcagacctgcccttgtggaacactctgccccagccagacacgtagccagagccaaacttcaggaagatgttggtgtactctttgtctgcaatgcagatgggggtaacatagctgttcagcaccagaggctcatcaagttccagcagggcaatgtcatggttgtacttgttgatggctgcattgtagttgtggtgagggatgatcctgatcacatttctcttctgctctgtgtgctctgtttcttctatgttgtgttcaccagccaccactgtgatcttgacacctgtttccacacagtgggcagctgtcacaatccatttttcattcacaatgctgcccccacagaaggcatccaccttgccattcagcaccacctgccatgggaactggccaggcttggcatcctctcctcccaccactctggtgaagtcattgaagctctgggtgctctgggtgatgttgtccaggatggtctcagcctcagtgctgttcacatagtccacatcagggaacactgtttcagccctggtcagcttggaggtctgggacacagacactctgccacaggggaaagggacagcaggttcacagctcttctggttttcagccagcctgtagccctctgtgcagctgcacaccaccttgttgtctgctgagttcttgcagaactgttcacatctgccattcttgatgttgcaggtgacatccagctcacagttcttgccctcaaagccaaaagggcaccagcactcatagctgttgatgtcatctttgcagctgcctccattcaggcaagggttgctctcacactggtctccatcaacgtactgcttccagaactcagtggttctctctgtgttttcaaacacttctctggcttcctcaaagctgcacttctcttccatgcactccctctccaggttgccctgcacaaactcctccagcttgccactgttgtatctcttgggtctgttgaggatcttgttggcattctcatggtccaggaaaactgtggaaacagggagagaaaaaccacacaacatatttaaagattgatgaagacaactaactgtaatatgctgctttttgttcttctcttcactgacctaagagatct

SEQ ID NO: 115 - DNA, 3280 bp, synthetic construct
  misc_feature 1..3280: note = Synthetic
  source 1..3280: mol_type = other DNA
agatctcttaggtcagtgaagagaagaacaaaaagcagcatattacagttagttgtcttcatcaatctttaaatatgttgtgtggtttttctctccctgtttccacagtttttcttgatcatgaaaacgccaacaaaattctgaatcggccaaagaggtataattcaggtaaattggaagagtttgttcaagggaaccttgagagagaatgtatggaagaaaagtgtagttttgaagaagcacgagaagtttttgaaaacactgaaagaacaactgaattttggaagcagtatgttgatggagatcagtgtgagtccaatccatgtttaaatggcggcagttgcaaggatgacattaattcctatgaatgttggtgtccctttggatttgaaggaaagaactgtgaattagatgtaacatgtaacattaagaatggcagatgcgagcagttttgtaaaaatagtgctgataacaaggtggtttgctcctgtactgagggatatcgacttgcagaaaaccagaagtcctgtgaaccagcagtgccatttccatgtggaagagtttctgtttcacaaacttctaagctcacccgtgctgagactgtttttcctgatgtggactatgtaaattctactgaagctgaaaccattttggataacatcactcaaagcacccaatcatttaatgacttcactcgggttgttggtggagaagatgccaaaccaggtcaattcccttggcaggttgttttgaatggtaaagttgatgcattctgtggaggctctatcgttaatgaaaaatggattgtaactgctgcccactgtgttgaaactggtgttaaaattacagttgtcgcaggtgaacataatattgaggagacagaacatacagagcaaaagcgaaatgtgattcgaattattcctcaccacaactacaatgcagctattaataagtacaaccatgacattgcccttctggaactggacgaacccttagtgctaaacagctacgttacacctatttgcattgctgacaaggaatacacgaacatcttcctcaaatttggatctggctatgtaagtggctggggaagagtcttccacaaagggagatcagctttagttcttcagtaccttagagttccacttgttgaccgagccacatgtcttcgatctacaaagttcaccatctataacaacatgttctgtgctggcttccatgaaggaggtagagattcatgtcaaggagatagtgggggaccccatgttactgaagtggaagggaccagtttcttaactggaattattagctggggtgaagagtgtgcaatgaaaggcaaatatggaatatataccaaggtatcccggtatgtcaactggattaaggaaaaaacaaagctcacttaacctcgactgtgccttctagttgccagccatctgttgtttgcccctcccccgtgccttccttgaccctggaaggtgccactcccactgtcctttcctaataaaatgaggaaattgcatcgcattgtctgagtaggtgtcattctattctggggggtggggtggggcaggacagcaagggggaggattgggaagacaatagcaggcatgctggggatgcggtgggctctatggcttctgaggcggaaagaaccagctggggctctagggggtatccccaaaaaacctcccacacctccccctgaacctgaaacataaaatgaatgcaattgttgttgttaacttgtttattgcagcttataatggttacaaataaagcaatagcatcacaaatttcacaaataaagcatttttttcactgcattctagttgtggtttgtccaaactcatcaatgtatcttatcatgtctgtcaggtcagcttggttttctctttgatccagttcacatatctgctaaccttggtgtagatgccatacttgcccttcatggcacactcttccccccagctgatgatgcctgtcaggaagctggtgccctccacctctgtcacatgtgggcctccagagtctccctggcagctgtctctgcctccctcatggaagccagcacagaacatgttgttgtagatggtgaacttggtgcttctcaggcaggtggccctgtccaccagggggactctcaggtattgcagtaccagggcagacctgcccttgtggaacactctgccccagccagacacatagccactgccaaacttgaggaagatgttggtgtactccttgtcagcaatgcagatgggggtaacatagctgttcagcaccagaggctcatcaagttccagcagggcaatgtcatggttgtacttgttgatggctgcattgtagttgtggtgagggatgatcctgatcacatttctcttctgctctgtgtgctctgtttcttctatgttgtgctctccagccaccactgtgattttgacacctgtctccacacagtgggcagctgtcacaatccatttctcattcacaatgctgcctccacagaaggcatccactttgccattcagcaccacctgccatgggaactggccaggcttggcatcctctccacccaccaccctggtgaagtcattgaaggactgggtgctctgggtgatgttgtccaggatggtttcagcctctgtgctgttcacatagtccacatcagggaacacagtctcagccctggtcagcttgctggtctgggacacagacactctgccacaggggaaagggacagcaggttcacaggacttctggttttctgccagcctgtagccctctgtgcagctgcacaccaccttgttgtcagcagagttcttgcagaactgttcacatctgccattcttgatgttgcaggtgacatccagctcacagtttttgccttcaaagccaaaagggcaccagcattcatagctgttgatgtcatccttgcagctgcctccattcaggcaagggttgctctcacactggtctccatccacatactgcttccagaactcagtggttctctctgtgttttcaaacacttccctggcttcttcaaagctgcacttttcttccatgcactctctctccaggttgccttgcacaaactcctccagcttgccagagttgtatctcttgggtctgttcaggatcttgttggcattctcatggtccaggaaaactgtggaaacagggagagaaaaaccacacaacatatttaaagattgatgaagacaactaactgtaatatgctgctttttgttcttctcttcactgacctaagagatct

SEQ ID NO: 116 - DNA, 3280 bp, synthetic construct
  misc_feature 1..3280: note = Synthetic
  source 1..3280: mol_type = other DNA
agatctcttaggtcagtgaagagaagaacaaaaagcagcatattacagttagttgtcttcatcaatctttaaatatgttgtgtggtttttctctccctgtttccacagtttttcttgatcatgaaaacgccaacaaaattctgaatcggccaaagaggtataattcaggtaaattggaagagtttgttcaagggaaccttgagagagaatgtatggaagaaaagtgtagttttgaagaagcacgagaagtttttgaaaacactgaaagaacaactgaattttggaagcagtatgttgatggagatcagtgtgagtccaatccatgtttaaatggcggcagttgcaaggatgacattaattcctatgaatgttggtgtccctttggatttgaaggaaagaactgtgaattagatgtaacatgtaacattaagaatggcagatgcgagcagttttgtaaaaatagtgctgataacaaggtggtttgctcctgtactgagggatatcgacttgcagaaaaccagaagtcctgtgaaccagcagtgccatttccatgtggaagagtttctgtttcacaaacttctaagctcacccgtgctgagactgtttttcctgatgtggactatgtaaattctactgaagctgaaaccattttggataacatcactcaaagcacccaatcatttaatgacttcactcgggttgttggtggagaagatgccaaaccaggtcaattcccttggcaggttgttttgaatggtaaagttgatgcattctgtggaggctctatcgttaatgaaaaatggattgtaactgctgcccactgtgttgaaactggtgttaaaattacagttgtcgcaggtgaacataatattgaggagacagaacatacagagcaaaagcgaaatgtgattcgaattattcctcaccacaactacaatgcagctattaataagtacaaccatgacattgcccttctggaactggacgaacccttagtgctaaacagctacgttacacctatttgcattgctgacaaggaatacacgaacatcttcctcaaatttggatctggctatgtaagtggctggggaagagtcttccacaaagggagatcagctttagttcttcagtaccttagagttccacttgttgaccgagccacatgtcttcgatctacaaagttcaccatctataacaacatgttctgtgctggcttccatgaaggaggtagagattcatgtcaaggagatagtgggggaccccatgttactgaagtggaagggaccagtttcttaactggaattattagctggggtgaagagtgtgcaatgaaaggcaaatatggaatatataccaaggtatcccggtatgtcaactggattaaggaaaaaacaaagctcacttaacctcgactgtgccttctagttgccagccatctgttgtttgcccctcccccgtgccttccttgaccctggaaggtgccactcccactgtcctttcctaataaaatgaggaaattgcatcgcattgtctgagtaggtgtcattctattctggggggtggggtggggcaggacagcaagggggaggattgggaagacaatagcaggcatgctggggatgcggtgggctctatggcttctgaggcggaaagaaccagctggggctctagggggtatccccaaaaaacctcccacacctccccctgaacctgaaacataaaatgaatgcaattgttgttgttaacttgtttattgcagcttataatggttacaaataaagcaatagcatcacaaatttcacaaataaagcatttttttcactgcattctagttgtggtttgtccaaactcatcaatgtatcttatcatgtctgtcaggtcagcttggttttctctttgatccagttcacatatctgctaaccttggtgtagatgccatacttgcccttcatggcacactcttccccccagctgatgatgcctgtcaggaagctggtgccctccacctctgtcacgtgtgggcctccagagtctccctggcagctgtctctgcctccctcatggaagccggcacagaacatgttgttgtagatggtgaacttggtgcttctcaggcaggtggccctgtccaccagggggactctcaggtattgcagtaccagggcagacctgcccttgtggaacactctgccccagccagacacatagccactgccaaacttgaggaagatgttggtgtactccttgtcagcaatgcagatgggggtaacatagctgttcagcaccagaggctcatcaagttccagcagggcaatgtcgtggttgtacttgttgatggctgcattgtagttgtggtgagggatgatccggatcacatttctcttctgctctgtgtgctctgtttcttctatgttgtgctctccagccaccactgtgattttgacacctgtctccacacagtgggcggctgtcacaatccatttctcattcacaatgctgcctccacagaaggcatccactttgccattcagcaccacctgccatgggaactggccaggcttggcatcctctccacccaccacccgggtgaagtcattgaaggactgggtgctctgggtgatgttgtccaggatggtttcagcctctgtgctgttcacgtagtccacatcagggaacacagtctcagccctggtcagcttgctggtctgggacacagacactctgccacaggggaaagggacagcaggttcacaggacttctggttttctgccagcctgtagccctctgtgcagctgcacaccaccttgttgtcagcagagttcttgcagaactgttcacatctgccattcttgatgttgcaggtgacatccagctcacagtttttgccttcaaagccaaaagggcaccagcattcgtagctgttgatgtcatccttgcagctgcctccattcaggcaagggttgctctcacactggtctccatccacgtactgcttccagaactcagtggttctctctgtgttttcaaacacttcccgggcttcttcaaagctgcacttttcttccatgcactctctctccaggttgccttgcacaaactcctccagcttgccagagttgtatctcttgggtctgttcaggatcttgttggcattctcatggtccaggaaaactgtggaaacagggagagaaaaaccacacaacatatttaaagattgatgaagacaactaactgtaatatgctgctttttgttcttctcttcactgacctaagagatct

SEQ ID NO: 117 - DNA, 3280 bp, synthetic construct
  misc_feature 1..3280: note = Synthetic
  source 1..3280: mol_type = other DNA
agatctcttaggtcagtgaagagaagaacaaaaagcagcatattacagttagttgtcttcatcaatctttaaatatgttgtgtggtttttctctccctgtttccacagtttttcttgatcatgaaaacgccaacaaaattctgaatcggccaaagaggtataattcaggtaaattggaagagtttgttcaagggaaccttgagagagaatgtatggaagaaaagtgtagttttgaagaagcacgagaagtttttgaaaacactgaaagaacaactgaattttggaagcagtatgttgatggagatcagtgtgagtccaatccatgtttaaatggcggcagttgcaaggatgacattaattcctatgaatgttggtgtccctttggatttgaaggaaagaactgtgaattagatgtaacatgtaacattaagaatggcagatgcgagcagttttgtaaaaatagtgctgataacaaggtggtttgctcctgtactgagggatatcgacttgcagaaaaccagaagtcctgtgaaccagcagtgccatttccatgtggaagagtttctgtttcacaaacttctaagctcacccgtgctgagactgtttttcctgatgtggactatgtaaattctactgaagctgaaaccattttggataacatcactcaaagcacccaatcatttaatgacttcactcgggttgttggtggagaagatgccaaaccaggtcaattcccttggcaggttgttttgaatggtaaagttgatgcattctgtggaggctctatcgttaatgaaaaatggattgtaactgctgcccactgtgttgaaactggtgttaaaattacagttgtcgcaggtgaacataatattgaggagacagaacatacagagcaaaagcgaaatgtgattcgaattattcctcaccacaactacaatgcagctattaataagtacaaccatgacattgcccttctggaactggacgaacccttagtgctaaacagctacgttacacctatttgcattgctgacaaggaatacacgaacatcttcctcaaatttggatctggctatgtaagtggctggggaagagtcttccacaaagggagatcagctttagttcttcagtaccttagagttccacttgttgaccgagccacatgtcttcgatctacaaagttcaccatctataacaacatgttctgtgctggcttccatgaaggaggtagagattcatgtcaaggagatagtgggggaccccatgttactgaagtggaagggaccagtttcttaactggaattattagctggggtgaagagtgtgcaatgaaaggcaaatatggaatatataccaaggtatcccggtatgtcaactggattaaggaaaaaacaaagctcacttaacctcgactgtgccttctagttgccagccatctgttgtttgcccctcccccgtgccttccttgaccctggaaggtgccactcccactgtcctttcctaataaaatgaggaaattgcatcgcattgtctgagtaggtgtcattctattctggggggtggggtggggcaggacagcaagggggaggattgggaagacaatagcaggcatgctggggatgcggtgggctctatggcttctgaggcggaaagaaccagctggggctctagggggtatccccaaaaaacctcccacacctccccctgaacctgaaacataaaatgaatgcaattgttgttgttaacttgtttattgcagcttataatggttacaaataaagcaatagcatcacaaatttcacaaataaagcatttttttcactgcattctagttgtggtttgtccaaactcatcaatgtatcttatcatgtctgtcaggtcagcttggttttctctttgatccagttgacatatctgctcaccttggtgtagatgccatacttgcccttcatggcacactcttccccccagctgatgatgcctgtcaggaagctggtgccctccacctctgtcacatgtgggcctccagagtctccctggcagctgtctctgcctccctcatggaagccagcacagaacatgttgttgtagatggtgaacttggtgcttctcaggcaggtggctctgtccaccagggggaccctcaggtattgcagcaccagggcagacctgcccttgtggaacactctgccccagccagacacatagccagagccaaacttcaggaagatgttggtgtactccttgtcagcaatgcagatgggggtaacatagctgttcagcaccagaggctcatcaagttccagcagggcaatgtcatggttgtacttgttgatggcagcattgtagttgtggtgagggatgattctgatcacattccttttctgctctgtgtgctctgtttcctcaatgttgtgctctccagccaccactgtgatcttgacacctgtctccacacagtgggcagctgtcacaatccacttttcattcacaatgctgcctccacagaaggcatccactttgccattgagcaccacctgccatgggaactggccaggcttggcatcctctccacccaccaccctggtgaagtcattgaaggactgggtgctctgggtgatgttgtccaggatggtttcagcttctgtgctgttcacatagtccacatcagggaacactgtctcagccctggtcagtttgctggtctggctcactgacactctgccacaggggaaaggcacagcaggttcacaggacttctggttttctgccagcctgtagccctctgtgcagctgcacaccaccttgttgtcagcagagttcttgcagaactgttcacatctgccatttttgatgttgcaggtgacatccagctcacagttcttgccttcaaagccaaaagggcaccagcattcatagctgttgatgtcatccttgcaggagcctccattcaggcaagggttgctctcacactggtctccatcaacatactgcttccagaactcagtggttctttctgtgttctcaaacacttccctggcttcctcaaagctgcacttctcttccatgcactccctctccaggttgccttgcacaaattcctccagcttgccactgttgtatctcttgggtctgttcaggatcttgttggcattctcatggtccaggaaaactgtggaaacagggagagaaaaaccacacaacatatttaaagattgatgaagacaactaactgtaatatgctgctttttgttcttctcttcactgacctaagagatct

SEQ ID NO: 118 - DNA, 3280 bp, synthetic construct
  misc_feature 1..3280: note = Synthetic
  source 1..3280: mol_type = other DNA
agatctcttaggtcagtgaagagaagaacaaaaagcagcatattacagttagttgtcttcatcaatctttaaatatgttgtgtggtttttctctccctgtttccacagtttttcttgatcatgaaaacgccaacaaaattctgaatcggccaaagaggtataattcaggtaaattggaagagtttgttcaagggaaccttgagagagaatgtatggaagaaaagtgtagttttgaagaagcacgagaagtttttgaaaacactgaaagaacaactgaattttggaagcagtatgttgatggagatcagtgtgagtccaatccatgtttaaatggcggcagttgcaaggatgacattaattcctatgaatgttggtgtccctttggatttgaaggaaagaactgtgaattagatgtaacatgtaacattaagaatggcagatgcgagcagttttgtaaaaatagtgctgataacaaggtggtttgctcctgtactgagggatatcgacttgcagaaaaccagaagtcctgtgaaccagcagtgccatttccatgtggaagagtttctgtttcacaaacttctaagctcacccgtgctgagactgtttttcctgatgtggactatgtaaattctactgaagctgaaaccattttggataacatcactcaaagcacccaatcatttaatgacttcactcgggttgttggtggagaagatgccaaaccaggtcaattcccttggcaggttgttttgaatggtaaagttgatgcattctgtggaggctctatcgttaatgaaaaatggattgtaactgctgcccactgtgttgaaactggtgttaaaattacagttgtcgcaggtgaacataatattgaggagacagaacatacagagcaaaagcgaaatgtgattcgaattattcctcaccacaactacaatgcagctattaataagtacaaccatgacattgcccttctggaactggacgaacccttagtgctaaacagctacgttacacctatttgcattgctgacaaggaatacacgaacatcttcctcaaatttggatctggctatgtaagtggctggggaagagtcttccacaaagggagatcagctttagttcttcagtaccttagagttccacttgttgaccgagccacatgtcttcgatctacaaagttcaccatctataacaacatgttctgtgctggcttccatgaaggaggtagagattcatgtcaaggagatagtgggggaccccatgttactgaagtggaagggaccagtttcttaactggaattattagctggggtgaagagtgtgcaatgaaaggcaaatatggaatatataccaaggtatcccggtatgtcaactggattaaggaaaaaacaaagctcacttaacctcgactgtgccttctagttgccagccatctgttgtttgcccctcccccgtgccttccttgaccctggaaggtgccactcccactgtcctttcctaataaaatgaggaaattgcatcgcattgtctgagtaggtgtcattctattctggggggtggggtggggcaggacagcaagggggaggattgggaagacaatagcaggcatgctggggatgcggtgggctctatggcttctgaggcggaaagaaccagctggggctctagggggtatccccaaaaaacctcccacacctccccctgaacctgaaacataaaatgaatgcaattgttgttgttaacttgtttattgcagcttataatggttacaaataaagcaatagcatcacaaatttcacaaataaagcatttttttcactgcattctagttgtggtttgtccaaactcatcaatgtatcttatcatgtctgtcaggtcagcttggttttctctttgatccagttgacatatctgctcaccttggtgtagatgccgtacttgcccttcatggcacactcttccccccagctgatgatgcctgtcaggaagctggtgccctccacctctgtcacgtgtgggcctccagagtctccctggcagctgtctctgcctccctcatggaagccggcacagaacatgttgttgtagatggtgaacttggtgcttctcaggcaggtggctctgtccaccagggggacccgcaggtattgcagcaccagggcagacctgcccttgtggaacactctgccccagccagacacgtagccagagccaaacttcaggaagatgttggtgtactccttgtcggcaatgcagatgggggtaacatagctgttcagcaccagaggctcatcaagttccagcagggcaatgtcgtggttgtacttgttgatggcagcattgtagttgtggtgagggatgattctgatcacattccgtttctgctctgtgtgctctgtttcctcgatgttgtgctctccagccaccactgtgatcttgacacctgtctccacacagtgggcggctgtcacgatccacttttcattcacaatgctgcctccacagaaggcatccactttgccattgagcaccacctgccatgggaactggccaggcttggcatcctctccacccaccacccgggtgaagtcattgaaggactgggtgctctgggtgatgttgtccaggatggtttcagcttctgtgctgttcacgtagtccacatcagggaacactgtctcagcccgggtcagtttgctggtctggctcactgacactctgccacaggggaaaggcacggcaggttcacaggacttctggttttctgccagcctgtagccctctgtgcagctgcacaccaccttgttgtcagcagagttcttgcagaactgttcacatctgccatttttgatgttgcaggtgacatccagctcacagttcttgccttcaaagccaaaagggcaccagcattcgtagctgttgatgtcatccttgcaggagcctccattcaggcaagggttgctctcgcactggtctccatcaacgtactgcttccagaactcagtggttctttctgtgttctcgaacacttcccgggcttcctcaaagctgcacttctcttccatgcactccctctccaggttgccttgcacaaattcctccagcttgccactgttgtatctcttgggtctgttcaggatcttgttggcattctcatggtccaggaaaactgtggaaacagggagagaaaaaccacacaacatatttaaagattgatgaagacaactaactgtaatatgctgctttttgttcttctcttcactgacctaagagatct

SEQ ID NO: 119 - DNA, 3280 bp, synthetic construct
  misc_feature 1..3280: note = Synthetic
  source 1..3280: mol_type = other DNA
agatctcttaggtcagtgaagagaagaacaaaaagcagcatattacagttagttgtcttcatcaatctttaaatatgttgtgtggtttttctctccctgtttccacagtttttcttgatcatgaaaatgccaacaaaattctgaataggccaaagaggtataattcagggaaattggaagagtttgttcaagggaaccttgagagagaatgtatggaagaaaagtgtagttttgaagaagcaagagaagtttttgaaaacactgaaagaacaactgaattttggaagcagtatgttgatggagatcagtgcgagtccaatccatgtttaaatgggggcagttgcaaggatgacattaattcctatgaatgttggtgtccctttggatttgaaggaaagaactgtgaattagatgtaacatgtaacattaagaatggcagatgtgagcagttttgtaaaaatagtgctgataacaaggtggtttgctcctgtactgagggatatagacttgcagaaaaccagaagtcctgtgaaccagcagtgccatttccatgtggaagagtttctgtttcacaaacttctaagctcaccagagctgagactgtttttcctgatgtggactatgtaaattctactgaagctgaaaccattttggataacatcactcaaagcacccaatcatttaatgacttcactagggttgttggtggagaagatgccaaaccaggacaattcccttggcaggttgttttgaatggtaaagttgatgcattctgtggaggctctattgttaatgaaaaatggattgtaactgctgcccactgtgttgaaactggtgttaaaattacagttgtggcaggtgaacataatattgaggagacagaacatacagagcaaaagagaaatgtgattagaattattcctcaccacaactacaatgcagctattaataagtacaaccatgacattgcccttctggaactggatgaacccttagtgctaaacagctatgttacacctatttgcattgctgacaaggaatacaccaacatcttcctcaaatttggatctggctatgtaagtggctggggaagagtcttccacaaagggagatcagctttagttcttcagtaccttagagttccacttgttgacagagccacatgtcttaggtctacaaagttcaccatctataacaacatgttctgtgctggcttccatgaaggaggtagagattcatgtcaaggagatagtgggggaccccatgttactgaagtggaagggaccagtttcttaactggaattattagctggggtgaagagtgtgcaatgaaaggcaaatatggaatatataccaaggtatccaggtatgtcaactggattaaggaaaaaacaaagctcacttaacctctactgtgccttctagttgccagccatctgttgtttgcccctcccccttgccttccttgaccctggaaggtgccactcccactgtcctttcctaataaaatgaggaaattgcatcacattgtctgagtaggtgtcattctattctggggggtggggtggggcaggacagcaagggggaggattgggaagacaatagcaggcatgctggggatgcagtgggctctatggcttctgaggtggaaagaaccagctggggctctagggggtatccccaaaaaacctcccacacctccccctgaacctgaaacataaaatgaatgcaattgttgttgttaacttgtttattgcagcttataatggttacaaataaagcaatagcatcacaaatttcacaaataaagcatttttttcactgcattctagttgtggtttgtccaaactcatcaatgtatcttatcatgtctgtcaggtcagtttggttttttctttgatccagttcacatatctggacaccttggtgtagatgccatacttgcccttcatggcacattcctctccccagctgatgatgcctgtcaggaagctggtgccctccacctctgtcacgtgtgggcctccagagtctccttggcagctgtctctgcctccctcatggaagccagcacagaacatgttgttgtagatggtgaacttggtgcttctcaggcaggtggctctgtccaccagggggactctcaggtattgcagcaccagggcagacctgcccttgtggaacactctgccccagccagacacgtagccagagccaaacttcaggaagatgttggtgtactctttgtctgcaatgcagatgggggtaacatagctgttcagcaccagaggctcatcaagttccagcagggcaatgtcatggttgtacttgttgatggctgcattgtagttgtggtgagggatgatcctgatcacatttctcttctgctctgtgtgctctgtttcttctatgttgtgttcaccagccaccactgtgatcttgacacctgtttccacacagtgggcagctgtcacaatccatttttcattcacaatgctgcccccacagaaggcatccaccttgccattcagcaccacctgccatgggaactggccaggcttggcatcctctcctcccaccactctggtgaagtcattgaagctctgggtgctctgggtgatgttgtccaggatggtctcagcctcagtgctgttcacatagtccacatcagggaacactgtttcagccctggtcagcttggaggtctgggacacagacactctgccacaggggaaagggacagcaggttcacagctcttctggttttcagccagcctgtagccctctgtgcagctgcacaccaccttgttgtctgctgagttcttgcagaactgttcacatctgccattcttgatgttgcaggtgacatccagctcacagttcttgccctcaaagccaaaagggcaccagcactcatagctgttgatgtcatctttgcagctgcctccattcaggcaagggttgctctcacactggtctccatcaacgtactgcttccagaactcagtggttctctctgtgttttcaaacacttctctggcttcctcaaagctgcacttctcttccatgcactccctctccaggttgccctgcacaaactcctccagcttgccactgttgtatctcttgggtctgttgaggatcttgttggcattctcatggtccaggaaaactgtggaaacagggagagaaaaaccacacaacatatttaaagattgatgaagacaactaactgtaatatgctgctttttgttcttctcttcactgacctaagagatct

SEQ ID NO: 120 - DNA, 3280 bp, synthetic construct
  misc_feature 1..3280: note = Synthetic
  source 1..3280: mol_type = other DNA
agatctcttaggtcagtgaagagaagaacaaaaagcagcatattacagttagttgtcttcatcaatctttaaatatgttgtgtggtttttctctccctgtttccacagtttttcttgatcatgaaaatgccaacaaaattctgaataggccaaagaggtataattcagggaaattggaagagtttgttcaagggaaccttgagagagaatgtatggaagaaaagtgtagttttgaagaagcaagagaagtttttgaaaacactgaaagaacaactgaattttggaagcagtatgttgatggagatcagtgcgagtccaatccatgtttaaatgggggcagttgcaaggatgacattaattcctatgaatgttggtgtccctttggatttgaaggaaagaactgtgaattagatgtaacatgtaacattaagaatggcagatgtgagcagttttgtaaaaatagtgctgataacaaggtggtttgctcctgtactgagggatatagacttgcagaaaaccagaagtcctgtgaaccagcagtgccatttccatgtggaagagtttctgtttcacaaacttctaagctcaccagagctgagactgtttttcctgatgtggactatgtaaattctactgaagctgaaaccattttggataacatcactcaaagcacccaatcatttaatgacttcactagggttgttggtggagaagatgccaaaccaggacaattcccttggcaggttgttttgaatggtaaagttgatgcattctgtggaggctctattgttaatgaaaaatggattgtaactgctgcccactgtgttgaaactggtgttaaaattacagttgtggcaggtgaacataatattgaggagacagaacatacagagcaaaagagaaatgtgattagaattattcctcaccacaactacaatgcagctattaataagtacaaccatgacattgcccttctggaactggatgaacccttagtgctaaacagctatgttacacctatttgcattgctgacaaggaatacaccaacatcttcctcaaatttggatctggctatgtaagtggctggggaagagtcttccacaaagggagatcagctttagttcttcagtaccttagagttccacttgttgacagagccacatgtcttaggtctacaaagttcaccatctataacaacatgttctgtgctggcttccatgaaggaggtagagattcatgtcaaggagatagtgggggaccccatgttactgaagtggaagggaccagtttcttaactggaattattagctggggtgaagagtgtgcaatgaaaggcaaatatggaatatataccaaggtatccaggtatgtcaactggattaaggaaaaaacaaagctcacttaacctctactgtgccttctagttgccagccatctgttgtttgcccctcccccttgccttccttgaccctggaaggtgccactcccactgtcctttcctaataaaatgaggaaattgcatcacattgtctgagtaggtgtcattctattctggggggtggggtggggcaggacagcaagggggaggattgggaagacaatagcaggcatgctggggatgcagtgggctctatggcttctgaggtggaaagaaccagctggggctctagggggtatccccaaaaaacctcccacacctccccctgaacctgaaacataaaatgaatgcaattgttgttgttaacttgtttattgcagcttataatggttacaaataaagcaatagcatcacaaatttcacaaataaagcatttttttcactgcattctagttgtggtttgtccaaactcatcaatgtatcttatcatgtctgtcaggtcagcttggttttctctttgatccagttcacatatctgctaaccttggtgtagatgccatacttgcccttcatggcacactcttccccccagctgatgatgcctgtcaggaagctggtgccctccacctctgtcacatgtgggcctccagagtctccctggcagctgtctctgcctccctcatggaagccagcacagaacatgttgttgtagatggtgaacttggtgcttctcaggcaggtggccctgtccaccagggggactctcaggtattgcagtaccagggcagacctgcccttgtggaacactctgccccagccagacacatagccactgccaaacttgaggaagatgttggtgtactccttgtcagcaatgcagatgggggtaacatagctgttcagcaccagaggctcatcaagttccagcagggcaatgtcatggttgtacttgttgatggctgcattgtagttgtggtgagggatgatcctgatcacatttctcttctgctctgtgtgctctgtttcttctatgttgtgctctccagccaccactgtgattttgacacctgtctccacacagtgggcagctgtcacaatccatttctcattcacaatgctgcctccacagaaggcatccactttgccattcagcaccacctgccatgggaactggccaggcttggcatcctctccacccaccaccctggtgaagtcattgaaggactgggtgctctgggtgatgttgtccaggatggtttcagcctctgtgctgttcacatagtccacatcagggaacacagtctcagccctggtcagcttgctggtctgggacacagacactctgccacaggggaaagggacagcaggttcacaggacttctggttttctgccagcctgtagccctctgtgcagctgcacaccaccttgttgtcagcagagttcttgcagaactgttcacatctgccattcttgatgttgcaggtgacatccagctcacagtttttgccttcaaagccaaaagggcaccagcattcatagctgttgatgtcatccttgcagctgcctccattcaggcaagggttgctctcacactggtctccatccacatactgcttccagaactcagtggttctctctgtgttttcaaacacttccctggcttcttcaaagctgcacttttcttccatgcactctctctccaggttgccttgcacaaactcctccagcttgccagagttgtatctcttgggtctgttcaggatcttgttggcattctcatggtccaggaaaactgtggaaacagggagagaaaaaccacacaacatatttaaagattgatgaagacaactaactgtaatatgctgctttttgttcttctcttcactgacctaagagatct

SEQ ID NO: 121 - DNA, 3280 bp, synthetic construct
  misc_feature 1..3280: note = Synthetic
  source 1..3280: mol_type = other DNA
agatctcttaggtcagtgaagagaagaacaaaaagcagcatattacagttagttgtcttcatcaatctttaaatatgttgtgtggtttttctctccctgtttccacagtttttcttgatcatgaaaatgccaacaaaattctgaataggccaaagaggtataattcagggaaattggaagagtttgttcaagggaaccttgagagagaatgtatggaagaaaagtgtagttttgaagaagcaagagaagtttttgaaaacactgaaagaacaactgaattttggaagcagtatgttgatggagatcagtgcgagtccaatccatgtttaaatgggggcagttgcaaggatgacattaattcctatgaatgttggtgtccctttggatttgaaggaaagaactgtgaattagatgtaacatgtaacattaagaatggcagatgtgagcagttttgtaaaaatagtgctgataacaaggtggtttgctcctgtactgagggatatagacttgcagaaaaccagaagtcctgtgaaccagcagtgccatttccatgtggaagagtttctgtttcacaaacttctaagctcaccagagctgagactgtttttcctgatgtggactatgtaaattctactgaagctgaaaccattttggataacatcactcaaagcacccaatcatttaatgacttcactagggttgttggtggagaagatgccaaaccaggacaattcccttggcaggttgttttgaatggtaaagttgatgcattctgtggaggctctattgttaatgaaaaatggattgtaactgctgcccactgtgttgaaactggtgttaaaattacagttgtggcaggtgaacataatattgaggagacagaacatacagagcaaaagagaaatgtgattagaattattcctcaccacaactacaatgcagctattaataagtacaaccatgacattgcccttctggaactggatgaacccttagtgctaaacagctatgttacacctatttgcattgctgacaaggaatacaccaacatcttcctcaaatttggatctggctatgtaagtggctggggaagagtcttccacaaagggagatcagctttagttcttcagtaccttagagttccacttgttgacagagccacatgtcttaggtctacaaagttcaccatctataacaacatgttctgtgctggcttccatgaaggaggtagagattcatgtcaaggagatagtgggggaccccatgttactgaagtggaagggaccagtttcttaactggaattattagctggggtgaagagtgtgcaatgaaaggcaaatatggaatatataccaaggtatccaggtatgtcaactggattaaggaaaaaacaaagctcacttaacctctactgtgccttctagttgccagccatctgttgtttgcccctcccccttgccttccttgaccctggaaggtgccactcccactgtcctttcctaataaaatgaggaaattgcatcacattgtctgagtaggtgtcattctattctggggggtggggtggggcaggacagcaagggggaggattgggaagacaatagcaggcatgctggggatgcagtgggctctatggcttctgaggtggaaagaaccagctggggctctagggggtatccccaaaaaacctcccacacctccccctgaacctgaaacataaaatgaatgcaattgttgttgttaacttgtttattgcagcttataatggttacaaataaagcaatagcatcacaaatttcacaaataaagcatttttttcactgcattctagttgtggtttgtccaaactcatcaatgtatcttatcatgtctgtcaggtcagcttggttttctctttgatccagttcacatatctgctaaccttggtgtagatgccatacttgcccttcatggcacactcttccccccagctgatgatgcctgtcaggaagctggtgccctccacctctgtcacgtgtgggcctccagagtctccctggcagctgtctctgcctccctcatggaagccggcacagaacatgttgttgtagatggtgaacttggtgcttctcaggcaggtggccctgtccaccagggggactctcaggtattgcagtaccagggcagacctgcccttgtggaacactctgccccagccagacacatagccactgccaaacttgaggaagatgttggtgtactccttgtcagcaatgcagatgggggtaacatagctgttcagcaccagaggctcatcaagttccagcagggcaatgtcgtggttgtacttgttgatggctgcattgtagttgtggtgagggatgatccggatcacatttctcttctgctctgtgtgctctgtttcttctatgttgtgctctccagccaccactgtgattttgacacctgtctccacacagtgggcggctgtcacaatccatttctcattcacaatgctgcctccacagaaggcatccactttgccattcagcaccacctgccatgggaactggccaggcttggcatcctctccacccaccacccgggtgaagtcattgaaggactgggtgctctgggtgatgttgtccaggatggtttcagcctctgtgctgttcacgtagtccacatcagggaacacagtctcagccctggtcagcttgctggtctgggacacagacactctgccacaggggaaagggacagcaggttcacaggacttctggttttctgccagcctgtagccctctgtgcagctgcacaccaccttgttgtcagcagagttcttgcagaactgttcacatctgccattcttgatgttgcaggtgacatccagctcacagtttttgccttcaaagccaaaagggcaccagcattcgtagctgttgatgtcatccttgcagctgcctccattcaggcaagggttgctctcacactggtctccatccacgtactgcttccagaactcagtggttctctctgtgttttcaaacacttcccgggcttcttcaaagctgcacttttcttccatgcactctctctccaggttgccttgcacaaactcctccagcttgccagagttgtatctcttgggtctgttcaggatcttgttggcattctcatggtccaggaaaactgtggaaacagggagagaaaaaccacacaacatatttaaagattgatgaagacaactaactgtaatatgctgctttttgttcttctcttcactgacctaagagatct

SEQ ID NO: 122 - DNA, 3280 bp, synthetic construct
  misc_feature 1..3280: note = Synthetic
  source 1..3280: mol_type = other DNA
agatctcttaggtcagtgaagagaagaacaaaaagcagcatattacagttagttgtcttcatcaatctttaaatatgttgtgtggtttttctctccctgtttccacagtttttcttgatcatgaaaatgccaacaaaattctgaataggccaaagaggtataattcagggaaattggaagagtttgttcaagggaaccttgagagagaatgtatggaagaaaagtgtagttttgaagaagcaagagaagtttttgaaaacactgaaagaacaactgaattttggaagcagtatgttgatggagatcagtgcgagtccaatccatgtttaaatgggggcagttgcaaggatgacattaattcctatgaatgttggtgtccctttggatttgaaggaaagaactgtgaattagatgtaacatgtaacattaagaatggcagatgtgagcagttttgtaaaaatagtgctgataacaaggtggtttgctcctgtactgagggatatagacttgcagaaaaccagaagtcctgtgaaccagcagtgccatttccatgtggaagagtttctgtttcacaaacttctaagctcaccagagctgagactgtttttcctgatgtggactatgtaaattctactgaagctgaaaccattttggataacatcactcaaagcacccaatcatttaatgacttcactagggttgttggtggagaagatgccaaaccaggacaattcccttggcaggttgttttgaatggtaaagttgatgcattctgtggaggctctattgttaatgaaaaatggattgtaactgctgcccactgtgttgaaactggtgttaaaattacagttgtggcaggtgaacataatattgaggagacagaacatacagagcaaaagagaaatgtgattagaattattcctcaccacaactacaatgcagctattaataagtacaaccatgacattgcccttctggaactggatgaacccttagtgctaaacagctatgttacacctatttgcattgctgacaaggaatacaccaacatcttcctcaaatttggatctggctatgtaagtggctggggaagagtcttccacaaagggagatcagctttagttcttcagtaccttagagttccacttgttgacagagccacatgtcttaggtctacaaagttcaccatctataacaacatgttctgtgctggcttccatgaaggaggtagagattcatgtcaaggagatagtgggggaccccatgttactgaagtggaagggaccagtttcttaactggaattattagctggggtgaagagtgtgcaatgaaaggcaaatatggaatatataccaaggtatccaggtatgtcaactggattaaggaaaaaacaaagctcacttaacctctactgtgccttctagttgccagccatctgttgtttgcccctcccccttgccttccttgaccctggaaggtgccactcccactgtcctttcctaataaaatgaggaaattgcatcacattgtctgagtaggtgtcattctattctggggggtggggtggggcaggacagcaagggggaggattgggaagacaatagcaggcatgctggggatgcagtgggctctatggcttctgaggtggaaagaaccagctggggctctagggggtatccccaaaaaacctcccacacctccccctgaacctgaaacataaaatgaatgcaattgttgttgttaacttgtttattgcagcttataatggttacaaataaagcaatagcatcacaaatttcacaaataaagcatttttttcactgcattctagttgtggtttgtccaaactcatcaatgtatcttatcatgtctgtcaggtcagcttggttttctctttgatccagttgacatatctgctcaccttggtgtagatgccatacttgcccttcatggcacactcttccccccagctgatgatgcctgtcaggaagctggtgccctccacctctgtcacatgtgggcctccagagtctccctggcagctgtctctgcctccctcatggaagccagcacagaacatgttgttgtagatggtgaacttggtgcttctcaggcaggtggctctgtccaccagggggaccctcaggtattgcagcaccagggcagacctgcccttgtggaacactctgccccagccagacacatagccagagccaaacttcaggaagatgttggtgtactccttgtcagcaatgcagatgggggtaacatagctgttcagcaccagaggctcatcaagttccagcagggcaatgtcatggttgtacttgttgatggcagcattgtagttgtggtgagggatgattctgatcacattccttttctgctctgtgtgctctgtttcctcaatgttgtgctctccagccaccactgtgatcttgacacctgtctccacacagtgggcagctgtcacaatccacttttcattcacaatgctgcctccacagaaggcatccactttgccattgagcaccacctgccatgggaactggccaggcttggcatcctctccacccaccaccctggtgaagtcattgaaggactgggtgctctgggtgatgttgtccaggatggtttcagcttctgtgctgttcacatagtccacatcagggaacactgtctcagccctggtcagtttgctggtctggctcactgacactctgccacaggggaaaggcacagcaggttcacaggacttctggttttctgccagcctgtagccctctgtgcagctgcacaccaccttgttgtcagcagagttcttgcagaactgttcacatctgccatttttgatgttgcaggtgacatccagctcacagttcttgccttcaaagccaaaagggcaccagcattcatagctgttgatgtcatccttgcaggagcctccattcaggcaagggttgctctcacactggtctccatcaacatactgcttccagaactcagtggttctttctgtgttctcaaacacttccctggcttcctcaaagctgcacttctcttccatgcactccctctccaggttgccttgcacaaattcctccagcttgccactgttgtatctcttgggtctgttcaggatcttgttggcattctcatggtccaggaaaactgtggaaacagggagagaaaaaccacacaacatatttaaagattgatgaagacaactaactgtaatatgctgctttttgttcttctcttcactgacctaagagatct

SEQ ID NO: 123 - DNA, 3280 bp, synthetic construct
  misc_feature 1..3280: note = Synthetic
  source 1..3280: mol_type = other DNA
agatctcttaggtcagtgaagagaagaacaaaaagcagcatattacagttagttgtcttcatcaatctttaaatatgttgtgtggtttttctctccctgtttccacagtttttcttgatcatgaaaatgccaacaaaattctgaataggccaaagaggtataattcagggaaattggaagagtttgttcaagggaaccttgagagagaatgtatggaagaaaagtgtagttttgaagaagcaagagaagtttttgaaaacactgaaagaacaactgaattttggaagcagtatgttgatggagatcagtgcgagtccaatccatgtttaaatgggggcagttgcaaggatgacattaattcctatgaatgttggtgtccctttggatttgaaggaaagaactgtgaattagatgtaacatgtaacattaagaatggcagatgtgagcagttttgtaaaaatagtgctgataacaaggtggtttgctcctgtactgagggatatagacttgcagaaaaccagaagtcctgtgaaccagcagtgccatttccatgtggaagagtttctgtttcacaaacttctaagctcaccagagctgagactgtttttcctgatgtggactatgtaaattctactgaagctgaaaccattttggataacatcactcaaagcacccaatcatttaatgacttcactagggttgttggtggagaagatgccaaaccaggacaattcccttggcaggttgttttgaatggtaaagttgatgcattctgtggaggctctattgttaatgaaaaatggattgtaactgctgcccactgtgttgaaactggtgttaaaattacagttgtggcaggtgaacataatattgaggagacagaacatacagagcaaaagagaaatgtgattagaattattcctcaccacaactacaatgcagctattaataagtacaaccatgacattgcccttctggaactggatgaacccttagtgctaaacagctatgttacacctatttgcattgctgacaaggaatacaccaacatcttcctcaaatttggatctggctatgtaagtggctggggaagagtcttccacaaagggagatcagctttagttcttcagtaccttagagttccacttgttgacagagccacatgtcttaggtctacaaagttcaccatctataacaacatgttctgtgctggcttccatgaaggaggtagagattcatgtcaaggagatagtgggggaccccatgttactgaagtggaagggaccagtttcttaactggaattattagctggggtgaagagtgtgcaatgaaaggcaaatatggaatatataccaaggtatccaggtatgtcaactggattaaggaaaaaacaaagctcacttaacctctactgtgccttctagttgccagccatctgttgtttgcccctcccccttgccttccttgaccctggaaggtgccactcccactgtcctttcctaataaaatgaggaaattgcatcacattgtctgagtaggtgtcattctattctggggggtggggtggggcaggacagcaagggggaggattgggaagacaatagcaggcatgctggggatgcagtgggctctatggcttctgaggtggaaagaaccagctggggctctagggggtatccccaaaaaacctcccacacctccccctgaacctgaaacataaaatgaatgcaattgttgttgttaacttgtttattgcagcttataatggttacaaataaagcaatagcatcacaaatttcacaaataaagcatttttttcactgcattctagttgtggtttgtccaaactcatcaatgtatcttatcatgtctgtcaggtcagcttggttttctctttgatccagttgacatatctgctcaccttggtgtagatgccgtacttgcccttcatggcacactcttccccccagctgatgatgcctgtcaggaagctggtgccctccacctctgtcacgtgtgggcctccagagtctccctggcagctgtctctgcctccctcatggaagccggcacagaacatgttgttgtagatggtgaacttggtgcttctcaggcaggtggctctgtccaccagggggacccgcaggtattgcagcaccagggcagacctgcccttgtggaacactctgccccagccagacacgtagccagagccaaacttcaggaagatgttggtgtactccttgtcggcaatgcagatgggggtaacatagctgttcagcaccagaggctcatcaagttccagcagggcaatgtcgtggttgtacttgttgatggcagcattgtagttgtggtgagggatgattctgatcacattccgtttctgctctgtgtgctctgtttcctcgatgttgtgctctccagccaccactgtgatcttgacacctgtctccacacagtgggcggctgtcacgatccacttttcattcacaatgctgcctccacagaaggcatccactttgccattgagcaccacctgccatgggaactggccaggcttggcatcctctccacccaccacccgggtgaagtcattgaaggactgggtgctctgggtgatgttgtccaggatggtttcagcttctgtgctgttcacgtagtccacatcagggaacactgtctcagcccgggtcagtttgctggtctggctcactgacactctgccacaggggaaaggcacggcaggttcacaggacttctggttttctgccagcctgtagccctctgtgcagctgcacaccaccttgttgtcagcagagttcttgcagaactgttcacatctgccatttttgatgttgcaggtgacatccagctcacagttcttgccttcaaagccaaaagggcaccagcattcgtagctgttgatgtcatccttgcaggagcctccattcaggcaagggttgctctcgcactggtctccatcaacgtactgcttccagaactcagtggttctttctgtgttctcgaacacttcccgggcttcctcaaagctgcacttctcttccatgcactccctctccaggttgccttgcacaaattcctccagcttgccactgttgtatctcttgggtctgttcaggatcttgttggcattctcatggtccaggaaaactgtggaaacagggagagaaaaaccacacaacatatttaaagattgatgaagacaactaactgtaatatgctgctttttgttcttctcttcactgacctaagagatct

SEQ ID NO: 124 - RNA, 4423 nt, synthetic construct
  misc_feature 1..4423: note = Synthetic
  source 1..4423: mol_type = other RNA
gggaagctcagaataaacgctcaactttggccggatctgccaccatggacaagaagtactccatcggcctggacatcggcaccaactccgtgggctgggccgtgatcaccgacgagtacaaggtgccctccaagaagttcaaggtgctgggcaacaccgaccggcactccatcaagaagaacctgatcggcgccctgctgttcgactccggcgagaccgccgaggccacccggctgaagcggaccgcccggcggcggtacacccggcggaagaaccggatctgctacctgcaggagatcttctccaacgagatggccaaggtggacgactccttcttccaccggctggaggagtccttcctggtggaggaggacaagaagcacgagcggcaccccatcttcggcaacatcgtggacgaggtggcctaccacgagaagtaccccaccatctaccacctgcggaagaagctggtggactccaccgacaaggccgacctgcggctgatctacctggccctggcccacatgatcaagttccggggccacttcctgatcgagggcgacctgaaccccgacaactccgacgtggacaagctgttcatccagctggtgcagacctacaaccagctgttcgaggagaaccccatcaacgcctccggcgtggacgccaaggccatcctgtccgcccggctgtccaagtcccggcggctggagaacctgatcgcccagctgcccggcgagaagaagaacggcctgttcggcaacctgatcgccctgtccctgggcctgacccccaacttcaagtccaacttcgacctggccgaggacgccaagctgcagctgtccaaggacacctacgacgacgacctggacaacctgctggcccagatcggcgaccagtacgccgacctgttcctggccgccaagaacctgtccgacgccatcctgctgtccgacatcctgcgggtgaacaccgagatcaccaaggcccccctgtccgcctccatgatcaagcggtacgacgagcaccaccaggacctgaccctgctgaaggccctggtgcggcagcagctgcccgagaagtacaaggagatcttcttcgaccagtccaagaacggctacgccggctacatcgacggcggcgcctcccaggaggagttctacaagttcatcaagcccatcctggagaagatggacggcaccgaggagctgctggtgaagctgaaccgggaggacctgctgcggaagcagcggaccttcgacaacggctccatcccccaccagatccacctgggcgagctgcacgccatcctgcggcggcaggaggacttctaccccttcctgaaggacaaccgggagaagatcgagaagatcctgaccttccggatcccctactacgtgggccccctggcccggggcaactcccggttcgcctggatgacccggaagtccgaggagaccatcaccccctggaacttcgaggaggtggtggacaagggcgcctccgcccagtccttcatcgagcggatgaccaacttcgacaagaacctgcccaacgagaaggtgctgcccaagcactccctgctgtacgagtacttcaccgtgtacaacgagctgaccaaggtgaagtacgtgaccgagggcatgcggaagcccgccttcctgtccggcgagcagaagaaggccatcgtggacctgctgttcaagaccaaccggaaggtgaccgtgaagcagctgaaggaggactacttcaagaagatcgagtgcttcgactccgtggagatctccggcgtggaggaccggttcaacgcctccctgggcacctaccacgacctgctgaagatcatcaaggacaaggacttcctggacaacgaggagaacgaggacatcctggaggacatcgtgctgaccctgaccctgttcgaggaccgggagatgatcgaggagcggctgaagacctacgcccacctgttcgacgacaaggtgatgaagcagctgaagcggcggcggtacaccggctggggccggctgtcccggaagctgatcaacggcatccgggacaagcagtccggcaagaccatcctggacttcctgaagtccgacggcttcgccaaccggaacttcatgcagctgatccacgacgactccctgaccttcaaggaggacatccagaaggcccaggtgtccggccagggcgactccctgcacgagcacatcgccaacctggccggctcccccgccatcaagaagggcatcctgcagaccgtgaaggtggtggacgagctggtgaaggtgatgggccggcacaagcccgagaacatcgtgatcgagatggcccgggagaaccagaccacccagaagggccagaagaactcccgggagcggatgaagcggatcgaggagggcatcaaggagctgggctcccagatcctgaaggagcaccccgtggagaacacccagctgcagaacgagaagctgtacctgtactacctgcagaacggccgggacatgtacgtggaccaggagctggacatcaaccggctgtccgactacgacgtggaccacatcgtgccccagtccttcctgaaggacgactccatcgacaacaaggtgctgacccggtccgacaagaaccggggcaagtccgacaacgtgccctccgaggaggtggtgaagaagatgaagaactactggcggcagctgctgaacgccaagctgatcacccagcggaagttcgacaacctgaccaaggccgagcggggcggcctgtccgagctggacaaggccggcttcatcaagcggcagctggtggagacccggcagatcaccaagcacgtggcccagatcctggactcccggatgaacaccaagtacgacgagaacgacaagctgatccgggaggtgaaggtgatcaccctgaagtccaagctggtgtccgacttccggaaggacttccagttctacaaggtgcgggagatcaacaactaccaccacgcccacgacgcctacctgaacgccgtggtgggcaccgccctgatcaagaagtaccccaagctggagtccgagttcgtgtacggcgactacaaggtgtacgacgtgcggaagatgatcgccaagtccgagcaggagatcggcaaggccaccgccaagtacttcttctactccaacatcatgaacttcttcaagaccgagatcaccctggccaacggcgagatccggaagcggcccctgatcgagaccaacggcgagaccggcgagatcgtgtgggacaagggccgggacttcgccaccgtgcggaaggtgctgtccatgccccaggtgaacatcgtgaagaagaccgaggtgcagaccggcggcttctccaaggagtccatcctgcccaagcggaactccgacaagctgatcgcccggaagaaggactgggaccccaagaagtacggcggcttcgactcccccaccgtggcctactccgtgctggtggtggccaaggtggagaagggcaagtccaagaagctgaagtccgtgaaggagctgctgggcatcaccatcatggagcggtcctccttcgagaagaaccccatcgacttcctggaggccaagggctacaaggaggtgaagaaggacctgatcatcaagctgcccaagtactccctgttcgagctggagaacggccggaagcggatgctggcctccgccggcgagctgcagaagggcaacgagctggccctgccctccaagtacgtgaacttcctgtacctggcctcccactacgagaagctgaagggctcccccgaggacaacgagcagaagcagctgttcgtggagcagcacaagcactacctggacgagatcatcgagcagatctccgagttctccaagcgggtgatcctggccgacgccaacctggacaaggtgctgtccgcctacaacaagcaccgggacaagcccatccgggagcaggccgagaacatcatccacctgttcaccctgaccaacctgggcgcccccgccgccttcaagtacttcgacaccaccatcgaccggaagcggtacacctccaccaaggaggtgctggacgccaccctgatccaccagtccatcaccggcctgtacgagacccggatcgacctgtcccagctgggcggcgacggcggcggctcccccaagaagaagcggaaggtgtgactagcaccagcctcaagaacacccgaatggagtctctaagctacataataccaacttacactttacaaaatgttgtcccccaaaatgtagccattcgtatctgctcctaataaaaagaaagtttcttcacattctctcgagaaaaaaaaaaaaaaaaaaaaaaaaaaaaaaaaaaaaaaaaaaaaaaaaaaaaaaaaaaaaaaaaaaaaaaaaaaaaaaaaaaaaaaaaaaaaatctag

SEQ ID NO: 125 - RNA, 4140 nt, synthetic construct
  misc_feature 1..4140: note = Synthetic
  source 1..4140: mol_type = other RNA
atggacaagaagtactccatcggcctggacatcggcaccaactccgtgggctgggccgtgatcaccgacgagtacaaggtgccctccaagaagttcaaggtgctgggcaacaccgaccggcactccatcaagaagaacctgatcggcgccctgctgttcgactccggcgagaccgccgaggccacccggctgaagcggaccgcccggcggcggtacacccggcggaagaaccggatctgctacctgcaggagatcttctccaacgagatggccaaggtggacgactccttcttccaccggctggaggagtccttcctggtggaggaggacaagaagcacgagcggcaccccatcttcggcaacatcgtggacgaggtggcctaccacgagaagtaccccaccatctaccacctgcggaagaagctggtggactccaccgacaaggccgacctgcggctgatctacctggccctggcccacatgatcaagttccggggccacttcctgatcgagggcgacctgaaccccgacaactccgacgtggacaagctgttcatccagctggtgcagacctacaaccagctgttcgaggagaaccccatcaacgcctccggcgtggacgccaaggccatcctgtccgcccggctgtccaagtcccggcggctggagaacctgatcgcccagctgcccggcgagaagaagaacggcctgttcggcaacctgatcgccctgtccctgggcctgacccccaacttcaagtccaacttcgacctggccgaggacgccaagctgcagctgtccaaggacacctacgacgacgacctggacaacctgctggcccagatcggcgaccagtacgccgacctgttcctggccgccaagaacctgtccgacgccatcctgctgtccgacatcctgcgggtgaacaccgagatcaccaaggcccccctgtccgcctccatgatcaagcggtacgacgagcaccaccaggacctgaccctgctgaaggccctggtgcggcagcagctgcccgagaagtacaaggagatcttcttcgaccagtccaagaacggctacgccggctacatcgacggcggcgcctcccaggaggagttctacaagttcatcaagcccatcctggagaagatggacggcaccgaggagctgctggtgaagctgaaccgggaggacctgctgcggaagcagcggaccttcgacaacggctccatcccccaccagatccacctgggcgagctgcacgccatcctgcggcggcaggaggacttctaccccttcctgaaggacaaccgggagaagatcgagaagatcctgaccttccggatcccctactacgtgggccccctggcccggggcaactcccggttcgcctggatgacccggaagtccgaggagaccatcaccccctggaacttcgaggaggtggtggacaagggcgcctccgcccagtccttcatcgagcggatgaccaacttcgacaagaacctgcccaacgagaaggtgctgcccaagcactccctgctgtacgagtacttcaccgtgtacaacgagctgaccaaggtgaagtacgtgaccgagggcatgcggaagcccgccttcctgtccggcgagcagaagaaggccatcgtggacctgctgttcaagaccaaccggaaggtgaccgtgaagcagctgaaggaggactacttcaagaagatcgagtgcttcgactccgtggagatctccggcgtggaggaccggttcaacgcctccctgggcacctaccacgacctgctgaagatcatcaaggacaaggacttcctggacaacgaggagaacgaggacatcctggaggacatcgtgctgaccctgaccctgttcgaggaccgggagatgatcgaggagcggctgaagacctacgcccacctgttcgacgacaaggtgatgaagcagctgaagcggcggcggtacaccggctggggccggctgtcccggaagctgatcaacggcatccgggacaagcagtccggcaagaccatcctggacttcctgaagtccgacggcttcgccaaccggaacttcatgcagctgatccacgacgactccctgaccttcaaggaggacatccagaaggcccaggtgtccggccagggcgactccctgcacgagcacatcgccaacctggccggctcccccgccatcaagaagggcatcctgcagaccgtgaaggtggtggacgagctggtgaaggtgatgggccggcacaagcccgagaacatcgtgatcgagatggcccgggagaaccagaccacccagaagggccagaagaactcccgggagcggatgaagcggatcgaggagggcatcaaggagctgggctcccagatcctgaaggagcaccccgtggagaacacccagctgcagaacgagaagctgtacctgtactacctgcagaacggccgggacatgtacgtggaccaggagctggacatcaaccggctgtccgactacgacgtggaccacatcgtgccccagtccttcctgaaggacgactccatcgacaacaaggtgctgacccggtccgacaagaaccggggcaagtccgacaacgtgccctccgaggaggtggtgaagaagatgaagaactactggcggcagctgctgaacgccaagctgatcacccagcggaagttcgacaacctgaccaaggccgagcggggcggcctgtccgagctggacaaggccggcttcatcaagcggcagctggtggagacccggcagatcaccaagcacgtggcccagatcctggactcccggatgaacaccaagtacgacgagaacgacaagctgatccgggaggtgaaggtgatcaccctgaagtccaagctggtgtccgacttccggaaggacttccagttctacaaggtgcgggagatcaacaactaccaccacgcccacgacgcctacctgaacgccgtggtgggcaccgccctgatcaagaagtaccccaagctggagtccgagttcgtgtacggcgactacaaggtgtacgacgtgcggaagatgatcgccaagtccgagcaggagatcggcaaggccaccgccaagtacttcttctactccaacatcatgaacttcttcaagaccgagatcaccctggccaacggcgagatccggaagcggcccctgatcgagaccaacggcgagaccggcgagatcgtgtgggacaagggccgggacttcgccaccgtgcggaaggtgctgtccatgccccaggtgaacatcgtgaagaagaccgaggtgcagaccggcggcttctccaaggagtccatcctgcccaagcggaactccgacaagctgatcgcccggaagaaggactgggaccccaagaagtacggcggcttcgactcccccaccgtggcctactccgtgctggtggtggccaaggtggagaagggcaagtccaagaagctgaagtccgtgaaggagctgctgggcatcaccatcatggagcggtcctccttcgagaagaaccccatcgacttcctggaggccaagggctacaaggaggtgaagaaggacctgatcatcaagctgcccaagtactccctgttcgagctggagaacggccggaagcggatgctggcctccgccggcgagctgcagaagggcaacgagctggccctgccctccaagtacgtgaacttcctgtacctggcctcccactacgagaagctgaagggctcccccgaggacaacgagcagaagcagctgttcgtggagcagcacaagcactacctggacgagatcatcgagcagatctccgagttctccaagcgggtgatcctggccgacgccaacctggacaaggtgctgtccgcctacaacaagcaccgggacaagcccatccgggagcaggccgagaacatcatccacctgttcaccctgaccaacctgggcgcccccgccgccttcaagtacttcgacaccaccatcgaccggaagcggtacacctccaccaaggaggtgctggacgccaccctgatccaccagtccatcaccggcctgtacgagacccggatcgacctgtcccagctgggcggcgacggcggcggctcccccaagaagaagcggaaggtgtga

SEQ ID NO: 126 - DNA, 4140 bp, synthetic construct
  misc_feature 1..4140: note = Synthetic
  source 1..4140: mol_type = other DNA
atggacaagaagtactccatcggcctggacatcggcaccaactccgtgggctgggccgtgatcaccgacgagtacaaggtgccctccaagaagttcaaggtgctgggcaacaccgaccggcactccatcaagaagaacctgatcggcgccctgctgttcgactccggcgagaccgccgaggccacccggctgaagcggaccgcccggcggcggtacacccggcggaagaaccggatctgctacctgcaggagatcttctccaacgagatggccaaggtggacgactccttcttccaccggctggaggagtccttcctggtggaggaggacaagaagcacgagcggcaccccatcttcggcaacatcgtggacgaggtggcctaccacgagaagtaccccaccatctaccacctgcggaagaagctggtggactccaccgacaaggccgacctgcggctgatctacctggccctggcccacatgatcaagttccggggccacttcctgatcgagggcgacctgaaccccgacaactccgacgtggacaagctgttcatccagctggtgcagacctacaaccagctgttcgaggagaaccccatcaacgcctccggcgtggacgccaaggccatcctgtccgcccggctgtccaagtcccggcggctggagaacctgatcgcccagctgcccggcgagaagaagaacggcctgttcggcaacctgatcgccctgtccctgggcctgacccccaacttcaagtccaacttcgacctggccgaggacgccaagctgcagctgtccaaggacacctacgacgacgacctggacaacctgctggcccagatcggcgaccagtacgccgacctgttcctggccgccaagaacctgtccgacgccatcctgctgtccgacatcctgcgggtgaacaccgagatcaccaaggcccccctgtccgcctccatgatcaagcggtacgacgagcaccaccaggacctgaccctgctgaaggccctggtgcggcagcagctgcccgagaagtacaaggagatcttcttcgaccagtccaagaacggctacgccggctacatcgacggcggcgcctcccaggaggagttctacaagttcatcaagcccatcctggagaagatggacggcaccgaggagctgctggtgaagctgaaccgggaggacctgctgcggaagcagcggaccttcgacaacggctccatcccccaccagatccacctgggcgagctgcacgccatcctgcggcggcaggaggacttctaccccttcctgaaggacaaccgggagaagatcgagaagatcctgaccttccggatcccctactacgtgggccccctggcccggggcaactcccggttcgcctggatgacccggaagtccgaggagaccatcaccccctggaacttcgaggaggtggtggacaagggcgcctccgcccagtccttcatcgagcggatgaccaacttcgacaagaacctgcccaacgagaaggtgctgcccaagcactccctgctgtacgagtacttcaccgtgtacaacgagctgaccaaggtgaagtacgtgaccgagggcatgcggaagcccgccttcctgtccggcgagcagaagaaggccatcgtggacctgctgttcaagaccaaccggaaggtgaccgtgaagcagctgaaggaggactacttcaagaagatcgagtgcttcgactccgtggagatctccggcgtggaggaccggttcaacgcctccctgggcacctaccacgacctgctgaagatcatcaaggacaaggacttcctggacaacgaggagaacgaggacatcctggaggacatcgtgctgaccctgaccctgttcgaggaccgggagatgatcgaggagcggctgaagacctacgcccacctgttcgacgacaaggtgatgaagcagctgaagcggcggcggtacaccggctggggccggctgtcccggaagctgatcaacggcatccgggacaagcagtccggcaagaccatcctggacttcctgaagtccgacggcttcgccaaccggaacttcatgcagctgatccacgacgactccctgaccttcaaggaggacatccagaaggcccaggtgtccggccagggcgactccctgcacgagcacatcgccaacctggccggctcccccgccatcaagaagggcatcctgcagaccgtgaaggtggtggacgagctggtgaaggtgatgggccggcacaagcccgagaacatcgtgatcgagatggcccgggagaaccagaccacccagaagggccagaagaactcccgggagcggatgaagcggatcgaggagggcatcaaggagctgggctcccagatcctgaaggagcaccccgtggagaacacccagctgcagaacgagaagctgtacctgtactacctgcagaacggccgggacatgtacgtggaccaggagctggacatcaaccggctgtccgactacgacgtggaccacatcgtgccccagtccttcctgaaggacgactccatcgacaacaaggtgctgacccggtccgacaagaaccggggcaagtccgacaacgtgccctccgaggaggtggtgaagaagatgaagaactactggcggcagctgctgaacgccaagctgatcacccagcggaagttcgacaacctgaccaaggccgagcggggcggcctgtccgagctggacaaggccggcttcatcaagcggcagctggtggagacccggcagatcaccaagcacgtggcccagatcctggactcccggatgaacaccaagtacgacgagaacgacaagctgatccgggaggtgaaggtgatcaccctgaagtccaagctggtgtccgacttccggaaggacttccagttctacaaggtgcgggagatcaacaactaccaccacgcccacgacgcctacctgaacgccgtggtgggcaccgccctgatcaagaagtaccccaagctggagtccgagttcgtgtacggcgactacaaggtgtacgacgtgcggaagatgatcgccaagtccgagcaggagatcggcaaggccaccgccaagtacttcttctactccaacatcatgaacttcttcaagaccgagatcaccctggccaacggcgagatccggaagcggcccctgatcgagaccaacggcgagaccggcgagatcgtgtgggacaagggccgggacttcgccaccgtgcggaaggtgctgtccatgccccaggtgaacatcgtgaagaagaccgaggtgcagaccggcggcttctccaaggagtccatcctgcccaagcggaactccgacaagctgatcgcccggaagaaggactgggaccccaagaagtacggcggcttcgactcccccaccgtggcctactccgtgctggtggtggccaaggtggagaagggcaagtccaagaagctgaagtccgtgaaggagctgctgggcatcaccatcatggagcggtcctccttcgagaagaaccccatcgacttcctggaggccaagggctacaaggaggtgaagaaggacctgatcatcaagctgcccaagtactccctgttcgagctggagaacggccggaagcggatgctggcctccgccggcgagctgcagaagggcaacgagctggccctgccctccaagtacgtgaacttcctgtacctggcctcccactacgagaagctgaagggctcccccgaggacaacgagcagaagcagctgttcgtggagcagcacaagcactacctggacgagatcatcgagcagatctccgagttctccaagcgggtgatcctggccgacgccaacctggacaaggtgctgtccgcctacaacaagcaccgggacaagcccatccgggagcaggccgagaacatcatccacctgttcaccctgaccaacctgggcgcccccgccgccttcaagtacttcgacaccaccatcgaccggaagcggtacacctccaccaaggaggtgctggacgccaccctgatccaccagtccatcaccggcctgtacgagacccggatcgacctgtcccagctgggcggcgacggcggcggctcccccaagaagaagcggaaggtgtga

SEQ ID NO: 127 - DNA, 709 bp, Homo sapiens
  source 1..709: mol_type = other DNA
gtaagaaatccatttttctattgttcaacttttattctattttcccagtaaaataaagttttagtaaactctgcatctttaaagaattattttggcatttatttctaaaatggcatagtattttgtatttgtgaagtcttacaaggttatcttattaataaaattcaaacatcctaggtaaaaaaaaaaaaaggtcagaattgtttagtgactgtaattttcttttgcgcactaaggaaagtgcaaagtaacttagagtgactgaaacttcacagaatagggttgaagattgaattcataactatcccaaagacctatccattgcactatgctttatttaaaaaccacaaaacctgtgctgttgatctcataaatagaacttgtatttatatttattttcattttagtctgtcttcttggttgctgttgatagacactaaaagagtattagatattatctaagtttgaatataaggctataaatatttaataatttttaaaatagtattcttggtaattgaattattcttctgtttaaaggcagaagaaataattgaacatcatcctgagtttttctgtaggaatcagagcccaatattttgaaacaaatgcataatctaagtcaaatggaaagaaatataaaaagtaacattattacttcttgttttcttcagtatttaacaatccttttttttcttcccttgcccag

SEQ ID NO: 128-130 - skipped (3 entries)

SEQ ID NO: 131 - protein, 1391 aa, synthetic construct
  REGION 1..1391: note = Synthetic
MDKPKKKRKVKYSIGLDIGTNSVGWAVITDEYKVPSKKFKVLGNTDRHSIKKNLIGALLFDSGETAEATRLKRTARRRYTRRKNRICYLQEIFSNEMAKVDDSFFHRLEESFLVEEDKKHERHPIFGNIVDEVAYHEKYPTIYHLRKKLVDSTDKADLRLIYLALAHMIKFRGHFLIEGDLNPDNSDVDKLFIQLVQTYNQLFEENPINASGVDAKAILSARLSKSRRLENLIAQLPGEKKNGLFGNLIALSLGLTPNFKSNFDLAEDAKLQLSKDTYDDDLDNLLAQIGDQYADLFLAAKNLSDAILLSDILRVNTEITKAPLSASMIKRYDEHHQDLTLLKALVRQQLPEKYKEIFFDQSKNGYAGYIDGGASQEEFYKFIKPILEKMDGTEELLVKLNREDLLRKQRTFDNGSIPHQIHLGELHAILRRQEDFYPFLKDNREKIEKILTFRIPYYVGPLARGNSRFAWMTRKSEETITPWNFEEVVDKGASAQSFIERMTNFDKNLPNEKVLPKHSLLYEYFTVYNELTKVKYVTEGMRKPAFLSGEQKKAIVDLLFKTNRKVTVKQLKEDYFKKIECFDSVEISGVEDRFNASLGTYHDLLKIIKDKDFLDNEENEDILEDIVLTLTLFEDREMIEERLKTYAHLFDDKVMKQLKRRRYTGWGRLSRKLINGIRDKQSGKTILDFLKSDGFANRNFMQLIHDDSLTFKEDIQKAQVSGQGDSLHEHIANLAGSPAIKKGILQTVKVVDELVKVMGRHKPENIVIEMARENQTTQKGQKNSRERMKRIEEGIKELGSQILKEHPVENTQLQNEKLYLYYLQNGRDMYVDQELDINRLSDYDVDHIVPQSFLKDDSIDNKVLTRSDKNRGKSDNVPSEEVVKKMKNYWRQLLNAKLITQRKFDNLTKAERGGLSELDKAGFIKRQLVETRQITKHVAQILDSRMNTKYDENDKLIREVKVITLKSKLVSDFRKDFQFYKVREINNYHHAHDAYLNAVVGTALIKKYPKLESEFVYGDYKVYDVRKMIAKSEQEIGKATAKYFFYSNIMNFFKTEITLANGEIRKRPLIETNGETGEIVWDKGRDFATVRKVLSMPQVNIVKKTEVQTGGFSKESILPKRNSDKLIARKKDWDPKKYGGFDSPTVAYSVLVVAKVEKGKSKKLKSVKELLGITIMERSSFEKNPIDFLEAKGYKEVKKDLIIKLPKYSLFELENGRKRMLASAGELQKGNELALPSKYVNFLYLASHYEKLKGSPEDNEQKQLFVEQHKHYLDEIIEQISEFSKRVILADANLDKVLSAYNKHRDKPIREQAENIIHLFTLTNLGAPAAFKYFDTTIDRKRYTSTKEVLDATLIHQSITGLYETRIDLSQLGGDKRPAATKKAGQAKKKK

SEQ ID NO: 132 - DNA, 4176 bp, synthetic construct
  misc_feature 1..4176: note = Synthetic
  source 1..4176: mol_type = other DNA
atggacaagcccaagaaaaagcggaaagtgaagtacagcatcggcctggacatcggcaccaactctgtgggctgggccgtgatcaccgacgagtacaaggtgcccagcaagaaattcaaggtgctgggcaacaccgacaggcacagcatcaagaagaacctgatcggcgccctgctgttcgacagcggcgaaacagccgaggccaccagactgaagagaaccgccagaagaagatacaccaggcggaagaacaggatctgctatctgcaagagatcttcagcaacgagatggccaaggtggacgacagcttcttccacagactggaagagtccttcctggtggaagaggacaagaagcacgagagacaccccatcttcggcaacatcgtggacgaggtggcctaccacgagaagtaccccaccatctaccacctgagaaagaaactggtggacagcaccgacaaggccgacctgagactgatctacctggccctggcccacatgatcaagttcagaggccacttcctgatcgagggcgacctgaaccccgacaacagcgacgtggacaagctgttcatccagctggtgcagacctacaaccagctgttcgaggaaaaccccatcaacgccagcggcgtggacgccaaggctatcctgtctgccagactgagcaagagcagaaggctggaaaatctgatcgcccagctgcccggcgagaagaagaacggcctgttcggcaacctgattgccctgagcctgggcctgacccccaacttcaagagcaacttcgacctggccgaggatgccaaactgcagctgagcaaggacacctacgacgacgacctggacaacctgctggcccagatcggcgaccagtacgccgacctgttcctggccgccaagaacctgtctgacgccatcctgctgagcgacatcctgagagtgaacaccgagatcaccaaggcccccctgagcgcctctatgatcaagagatacgacgagcaccaccaggacctgaccctgctgaaagctctcgtgcggcagcagctgcctgagaagtacaaagaaatcttcttcgaccagagcaagaacggctacgccggctacatcgatggcggcgctagccaggaagagttctacaagttcatcaagcccatcctggaaaagatggacggcaccgaggaactgctcgtgaagctgaacagagaggacctgctgagaaagcagagaaccttcgacaacggcagcatcccccaccagatccacctgggagagctgcacgctatcctgagaaggcaggaagatttttacccattcctgaaggacaaccgggaaaagatcgagaagatcctgaccttcaggatcccctactacgtgggccccctggccagaggcaacagcagattcgcctggatgaccagaaagagcgaggaaaccatcaccccctggaacttcgaggaagtggtggacaagggcgccagcgcccagagcttcatcgagagaatgacaaacttcgataagaacctgcccaacgagaaggtgctgcccaagcacagcctgctgtacgagtacttcaccgtgtacaacgagctgaccaaagtgaaatacgtgaccgagggaatgagaaagcccgccttcctgagcggcgagcagaaaaaggccatcgtggacctgctgttcaagaccaacagaaaagtgaccgtgaagcagctgaaagaggactacttcaagaaaatcgagtgcttcgactccgtggaaatctccggcgtggaagatagattcaacgcctccctgggcacataccacgatctgctgaaaattatcaaggacaaggacttcctggataacgaagagaacgaggacattctggaagatatcgtgctgaccctgacactgtttgaggaccgcgagatgatcgaggaaaggctgaaaacctacgctcacctgttcgacgacaaagtgatgaagcagctgaagagaaggcggtacaccggctggggcaggctgagcagaaagctgatcaacggcatcagagacaagcagagcggcaagacaatcctggatttcctgaagtccgacggcttcgccaaccggaacttcatgcagctgatccacgacgacagcctgacattcaaagaggacatccagaaagcccaggtgtccggccagggcgactctctgcacgagcatatcgctaacctggccggcagccccgctatcaagaagggcatcctgcagacagtgaaggtggtggacgagctcgtgaaagtgatgggcagacacaagcccgagaacatcgtgatcgagatggctagagagaaccagaccacccagaagggacagaagaactcccgcgagaggatgaagagaatcgaagagggcatcaaagagctgggcagccagatcctgaaagaacaccccgtggaaaacacccagctgcagaacgagaagctgtacctgtactacctgcagaatggccgggatatgtacgtggaccaggaactggacatcaacagactgtccgactacgatgtggaccatatcgtgcctcagagctttctgaaggacgactccatcgataacaaagtgctgactcggagcgacaagaacagaggcaagagcgacaacgtgccctccgaagaggtcgtgaagaagatgaagaactactggcgacagctgctgaacgccaagctgattacccagaggaagttcgataacctgaccaaggccgagagaggcggcctgagcgagctggataaggccggcttcatcaagaggcagctggtggaaaccagacagatcacaaagcacgtggcacagatcctggactcccggatgaacactaagtacgacgaaaacgataagctgatccgggaagtgaaagtgatcaccctgaagtccaagctggtgtccgatttccggaaggatttccagttttacaaagtgcgcgagatcaacaactaccaccacgcccacgacgcctacctgaacgccgtcgtgggaaccgccctgatcaaaaagtaccctaagctggaaagcgagttcgtgtacggcgactacaaggtgtacgacgtgcggaagatgatcgccaagagcgagcaggaaatcggcaaggctaccgccaagtacttcttctacagcaacatcatgaactttttcaagaccgaaatcaccctggccaacggcgagatcagaaagcgccctctgatcgagacaaacggcgaaaccggggagatcgtgtgggataagggcagagacttcgccacagtgcgaaaggtgctgagcatgccccaagtgaatatcgtgaaaaagaccgaggtgcagacaggcggcttcagcaaagagtctatcctgcccaagaggaacagcgacaagctgatcgccagaaagaaggactgggaccccaagaagtacggcggcttcgacagccctaccgtggcctactctgtgctggtggtggctaaggtggaaaagggcaagtccaagaaactgaagagtgtgaaagagctgctggggatcaccatcatggaaagaagcagctttgagaagaaccctatcgactttctggaagccaagggctacaaagaagtgaaaaaggacctgatcatcaagctgcctaagtactccctgttcgagctggaaaacggcagaaagagaatgctggcctctgccggcgaactgcagaagggaaacgagctggccctgcctagcaaatatgtgaacttcctgtacctggcctcccactatgagaagctgaagggcagccctgaggacaacgaacagaaacagctgtttgtggaacagcataagcactacctggacgagatcatcgagcagatcagcgagttctccaagagagtgatcctggccgacgccaatctggacaaggtgctgtctgcctacaacaagcacagggacaagcctatcagagagcaggccgagaatatcatccacctgttcaccctgacaaacctgggcgctcctgccgccttcaagtactttgacaccaccatcgaccggaagaggtacaccagcaccaaagaggtgctggacgccaccctgatccaccagagcatcaccggcctgtacgagacaagaatcgacctgtctcagctgggaggcgacaagagacctgccgccactaagaaggccggacaggccaaaaagaagaagtga

SEQ ID NO: 133 - DNA, 4218 bp, synthetic construct
  misc_feature 1..4218: note = Synthetic
  source 1..4218: mol_type = other DNA
atggccccaaagaagaagcggaaggtcggtatccacggagtcccagcagccgacaagaagtacagcatcggcctggacatcggcaccaactctgtgggctgggccgtgatcaccgacgagtacaaggtgcccagcaagaaattcaaggtgctgggcaacaccgaccggcacagcatcaagaagaacctgatcggagccctgctgttcgacagcggcgaaacagccgaggccacccggctgaagagaaccgccagaagaagatacaccagacggaagaaccggatctgctatctgcaagagatcttcagcaacgagatggccaaggtggacgacagcttcttccacagactggaagagtccttcctggtggaagaggacaagaagcacgagagacaccccatcttcggcaacatcgtggacgaggtggcctaccacgagaagtaccccaccatctaccacctgagaaagaaactggtggacagcaccgacaaggccgacctgagactgatctacctggccctggcccacatgatcaagttcagaggccacttcctgatcgagggcgacctgaaccccgacaacagcgacgtggacaagctgttcatccagctggtgcagacctacaaccagctgttcgaggaaaaccccatcaacgccagcggcgtggacgccaaggctatcctgtctgccagactgagcaagagcagaaggctggaaaatctgatcgcccagctgcccggcgagaagaagaacggcctgttcggcaacctgattgccctgagcctgggcctgacccccaacttcaagagcaacttcgacctggccgaggatgccaaactgcagctgagcaaggacacctacgacgacgacctggacaacctgctggcccagatcggcgaccagtacgccgacctgttcctggccgccaagaacctgtctgacgccatcctgctgagcgacatcctgagagtgaacaccgagatcaccaaggcccccctgagcgcctctatgatcaagagatacgacgagcaccaccaggacctgaccctgctgaaagctctcgtgcggcagcagctgcctgagaagtacaaagaaatcttcttcgaccagagcaagaacggctacgccggctacatcgatggcggcgctagccaggaagagttctacaagttcatcaagcccatcctggaaaagatggacggcaccgaggaactgctcgtgaagctgaacagagaggacctgctgagaaagcagagaaccttcgacaacggcagcatcccccaccagatccacctgggagagctgcacgctatcctgagaaggcaggaagatttttacccattcctgaaggacaaccgggaaaagatcgagaagatcctgaccttcaggatcccctactacgtgggccccctggccagaggcaacagcagattcgcctggatgaccagaaagagcgaggaaaccatcaccccctggaacttcgaggaagtggtggacaagggcgccagcgcccagagcttcatcgagagaatgacaaacttcgataagaacctgcccaacgagaaggtgctgcccaagcacagcctgctgtacgagtacttcaccgtgtacaacgagctgaccaaagtgaaatacgtgaccgagggaatgagaaagcccgccttcctgagcggcgagcagaaaaaggccatcgtggacctgctgttcaagaccaacagaaaagtgaccgtgaagcagctgaaagaggactacttcaagaaaatcgagtgcttcgactccgtggaaatctccggcgtggaagatagattcaacgcctccctgggcacataccacgatctgctgaaaattatcaaggacaaggacttcctggataacgaagagaacgaggacattctggaagatatcgtgctgaccctgacactgtttgaggaccgcgagatgatcgaggaaaggctgaaaacctacgctcacctgttcgacgacaaagtgatgaagcagctgaagagaaggcggtacaccggctggggcaggctgagcagaaagctgatcaacggcatcagagacaagcagagcggcaagacaatcctggatttcctgaagtccgacggcttcgccaaccggaacttcatgcagctgatccacgacgacagcctgacattcaaagaggacatccagaaagcccaggtgtccggccagggcgactctctgcacgagcatatcgctaacctggccggcagccccgctatcaagaagggcatcctgcagacagtgaaggtggtggacgagctcgtgaaagtgatgggcagacacaagcccgagaacatcgtgatcgagatggctagagagaaccagaccacccagaagggacagaagaactcccgcgagaggatgaagagaatcgaagagggcatcaaagagctgggcagccagatcctgaaagaacaccccgtggaaaacacccagctgcagaacgagaagctgtacctgtactacctgcagaatggccgggatatgtacgtggaccaggaactggacatcaacagactgtccgactacgatgtggaccatatcgtgcctcagagctttctgaaggacgactccatcgataacaaagtgctgactcggagcgacaagaacagaggcaagagcgacaacgtgccctccgaagaggtcgtgaagaagatgaagaactactggcgacagctgctgaacgccaagctgattacccagaggaagttcgataacctgaccaaggccgagagaggcggcctgagcgagctggataaggccggcttcatcaagaggcagctggtggaaaccagacagatcacaaagcacgtggcacagatcctggactcccggatgaacactaagtacgacgaaaacgataagctgatccgggaagtgaaagtgatcaccctgaagtccaagctggtgtccgatttccggaaggatttccagttttacaaagtgcgcgagatcaacaactaccaccacgcccacgacgcctacctgaacgccgtcgtgggaaccgccctgatcaaaaagtaccctaagctggaaagcgagttcgtgtacggcgactacaaggtgtacgacgtgcggaagatgatcgccaagagcgagcaggaaatcggcaaggctaccgccaagtacttcttctacagcaacatcatgaactttttcaagaccgaaatcaccctggccaacggcgagatcagaaagcgccctctgatcgagacaaacggcgaaaccggggagatcgtgtgggataagggcagagacttcgccacagtgcgaaaggtgctgagcatgccccaagtgaatatcgtgaaaaagaccgaggtgcagacaggcggcttcagcaaagagtctatcctgcccaagaggaacagcgacaagctgatcgccagaaagaaggactgggaccccaagaagtacggcggcttcgacagccctaccgtggcctactctgtgctggtggtggctaaggtggaaaagggcaagtccaagaaactgaagagtgtgaaagagctgctggggatcaccatcatggaaagaagcagctttgagaagaaccctatcgactttctggaagccaagggctacaaagaagtgaaaaaggacctgatcatcaagctgcctaagtactccctgttcgagctggaaaacggcagaaagagaatgctggcctctgccggcgaactgcagaagggaaacgagctggccctgcctagcaaatatgtgaacttcctgtacctggcctcccactatgagaagctgaagggcagccctgaggacaacgaacagaaacagctgtttgtggaacagcataagcactacctggacgagatcatcgagcagatcagcgagttctccaagagagtgatcctggccgacgccaatctggacaaggtgctgtctgcctacaacaagcacagggacaagcctatcagagagcaggccgagaatatcatccacctgttcaccctgacaaacctgggcgctcctgccgccttcaagtactttgacaccaccatcgaccggaagaggtacaccagcaccaaagaggtgctggacgccaccctgatccaccagagcatcaccggcctgtacgagacaagaatcgacctgtctcagctgggaggcgacaagagacctgccgccactaagaaggccggacaggccaaaaagaagaagtgagcggccgcttaatta

SEQ ID NO: 134 - protein, 1379 aa, synthetic construct
  REGION 1..1379: note = Synthetic
MDKKYSIGLDIGTNSVGWAVITDEYKVPSKKFKVLGNTDRHSIKKNLIGALLFDSGETAEATRLKRTARRRYTRRKNRICYLQEIFSNEMAKVDDSFFHRLEESFLVEEDKKHERHPIFGNIVDEVAYHEKYPTIYHLRKKLVDSTDKADLRLIYLALAHMIKFRGHFLIEGDLNPDNSDVDKLFIQLVQTYNQLFEENPINASGVDAKAILSARLSKSRRLENLIAQLPGEKKNGLFGNLIALSLGLTPNFKSNFDLAEDAKLQLSKDTYDDDLDNLLAQIGDQYADLFLAAKNLSDAILLSDILRVNTEITKAPLSASMIKRYDEHHQDLTLLKALVRQQLPEKYKEIFFDQSKNGYAGYIDGGASQEEFYKFIKPILEKMDGTEELLVKLNREDLLRKQRTFDNGSIPHQIHLGELHAILRRQEDFYPFLKDNREKIEKILTFRIPYYVGPLARGNSRFAWMTRKSEETITPWNFEEVVDKGASAQSFIERMTNFDKNLPNEKVLPKHSLLYEYFTVYNELTKVKYVTEGMRKPAFLSGEQKKAIVDLLFKTNRKVTVKQLKEDYFKKIECFDSVEISGVEDRFNASLGTYHDLLKIIKDKDFLDNEENEDILEDIVLTLTLFEDREMIEERLKTYAHLFDDKVMKQLKRRRYTGWGRLSRKLINGIRDKQSGKTILDFLKSDGFANRNFMQLIHDDSLTFKEDIQKAQVSGQGDSLHEHIANLAGSPAIKKGILQTVKVVDELVKVMGRHKPENIVIEMARENQTTQKGQKNSRERMKRIEEGIKELGSQILKEHPVENTQLQNEKLYLYYLQNGRDMYVDQELDINRLSDYDVDHIVPQSFLKDDSIDNKVLTRSDKNRGKSDNVPSEEVVKKMKNYWRQLLNAKLITQRKFDNLTKAERGGLSELDKAGFIKRQLVETRQITKHVAQILDSRMNTKYDENDKLIREVKVITLKSKLVSDFRKDFQFYKVREINNYHHAHDAYLNAVVGTALIKKYPKLESEFVYGDYKVYDVRKMIAKSEQEIGKATAKYFFYSNIMNFFKTEITLANGEIRKRPLIETNGETGEIVWDKGRDFATVRKVLSMPQVNIVKKTEVQTGGFSKESILPKRNSDKLIARKKDWDPKKYGGFDSPTVAYSVLVVAKVEKGKSKKLKSVKELLGITIMERSSFEKNPIDFLEAKGYKEVKKDLIIKLPKYSLFELENGRKRMLASAGELQKGNELALPSKYVNFLYLASHYEKLKGSPEDNEQKQLFVEQHKHYLDEIIEQISEFSKRVILADANLDKVLSAYNKHRDKPIREQAENIIHLFTLTNLGAPAAFKYFDTTIDRKRYTSTKEVLDATLIHQSITGLYETRIDLSQLGGDGGGSPKKKRKV

SEQ ID NO: 135 - RNA, 4514 nt, synthetic construct
  misc_feature 1..4514: note = Synthetic
  source 1..4514: mol_type = other RNA
gggtcccgcagtcggcgtccagcggctctgcttgttcgtgtgtgtgtcgttgcaggccttattcggatccatggataagaagtactcaatcgggctggatatcggaactaattccgtgggttgggcagtgatcacggatgaatacaaagtgccgtccaagaagttcaaggtcctggggaacaccgatagacacagcatcaagaaaaatctcatcggagccctgctgtttgactccggcgaaaccgcagaagcgacccggctcaaacgtaccgcgaggcgacgctacacccggcggaagaatcgcatctgctatctgcaagagatcttttcgaacgaaatggcaaaggtcgacgacagcttcttccaccgcctggaagaatctttcctggtggaggaggacaagaagcatgaacggcatcctatctttggaaacatcgtcgacgaagtggcgtaccacgaaaagtacccgaccatctaccatctgcggaagaagttggttgactcaactgacaaggccgacctcagattgatctacttggccctcgcccatatgatcaaattccgcggacacttcctgatcgaaggcgatctgaaccctgataactccgacgtggataagcttttcattcaactggtgcagacctacaaccaactgttcgaagaaaacccaatcaatgctagcggcgtcgatgccaaggccatcctgtccgcccggctgtcgaagtcgcggcgcctcgaaaacctgatcgcacagctgccgggagagaaaaagaacggacttttcggcaacttgatcgctctctcactgggactcactcccaatttcaagtccaattttgacctggccgaggacgcgaagctgcaactctcaaaggacacctacgacgacgacttggacaatttgctggcacaaattggcgatcagtacgcggatctgttccttgccgctaagaacctttcggacgcaatcttgctgtccgatatcctgcgcgtgaacaccgaaataaccaaagcgccgcttagcgcctcgatgattaagcggtacgacgagcatcaccaggatctcacgctgctcaaagcgctcgtgagacagcaactgcctgaaaagtacaaggagatcttcttcgaccagtccaagaatgggtacgcagggtacatcgatggaggcgctagccaggaagagttctataagttcatcaagccaatcctggaaaagatggacggaaccgaagaactgctggtcaagctgaacagggaggatctgctccggaaacagagaacctttgacaacggatccattccccaccagatccatctgggtgagctgcacgccatcttgcggcgccaggaggacttttacccattcctcaaggacaaccgggaaaagatcgagaaaattctgacgttccgcatcccgtattacgtgggcccactggcgcgcggcaattcgcgcttcgcgtggatgactagaaaatcagaggaaaccatcactccttggaatttcgaggaagttgtggataagggagcttcggcacaaagcttcatcgaacgaatgaccaacttcgacaagaatctcccaaacgagaaggtgcttcctaagcacagcctcctttacgaatacttcactgtctacaacgaactgactaaagtgaaatacgttactgaaggaatgaggaagccggcctttctgtccggagaacagaagaaagcaattgtcgatctgctgttcaagaccaaccgcaaggtgaccgtcaagcagcttaaagaggactacttcaagaagatcgagtgtttcgactcagtggaaatcagcggggtggaggacagattcaacgcttcgctgggaacctatcatgatctcctgaagatcatcaaggacaaggacttccttgacaacgaggagaacgaggacatcctggaagatatcgtcctgaccttgacccttttcgaggatcgcgagatgatcgaggagaggcttaagacctacgctcatctcttcgacgataaggtcatgaaacaactcaagcgccgccggtacactggttggggccgcctctcccgcaagctgatcaacggtattcgcgataaacagagcggtaaaactatcctggatttcctcaaatcggatggcttcgctaatcgtaacttcatgcaattgatccacgacgacagcctgacctttaaggaggacatccaaaaagcacaagtgtccggacagggagactcactccatgaacacatcgcgaatctggccggttcgccggcgattaagaagggaattctgcaaactgtgaaggtggtcgacgagctggtgaaggtcatgggacggcacaaaccggagaatatcgtgattgaaatggcccgagaaaaccagactacccagaagggccagaaaaactcccgcgaaaggatgaagcggatcgaagaaggaatcaaggagctgggcagccagatcctgaaagagcacccggtggaaaacacgcagctgcagaacgagaagctctacctgtactatttgcaaaatggacgggacatgtacgtggaccaagagctggacatcaatcggttgtctgattacgacgtggaccacatcgttccacagtcctttctgaaggatgactcgatcgataacaaggtgttgactcgcagcgacaagaacagagggaagtcagataatgtgccatcggaggaggtcgtgaagaagatgaagaattactggcggcagctcctgaatgcgaagctgattacccagagaaagtttgacaatctcactaaagccgagcgcggcggactctcagagctggataaggctggattcatcaaacggcagctggtcgagactcggcagattaccaagcacgtggcgcagatcttggactcccgcatgaacactaaatacgacgagaacgataagctcatccgggaagtgaaggtgattaccctgaaaagcaaacttgtgtcggactttcggaaggactttcagttttacaaagtgagagaaatcaacaactaccatcacgcgcatgacgcatacctcaacgctgtggtcggtaccgccctgatcaaaaagtaccctaaacttgaatcggagtttgtgtacggagactacaaggtctacgacgtgaggaagatgatagccaagtccgaacaggaaatcgggaaagcaactgcgaaatacttcttttactcaaacatcatgaactttttcaagactgaaattacgctggccaatggagaaatcaggaagaggccactgatcgaaactaacggagaaacgggcgaaatcgtgtgggacaagggcagggacttcgcaactgttcgcaaagtgctctctatgccgcaagtcaatattgtgaagaaaaccgaagtgcaaaccggcggattttcaaaggaatcgatcctcccaaagagaaatagcgacaagctcattgcacgcaagaaagactgggacccgaagaagtacggaggattcgattcgccgactgtcgcatactccgtcctcgtggtggccaaggtggagaagggaaagagcaaaaagctcaaatccgtcaaagagctgctggggattaccatcatggaacgatcctcgttcgagaagaacccgattgatttcctcgaggcgaagggttacaaggaggtgaagaaggatctgatcatcaaactccccaagtactcactgttcgaactggaaaatggtcggaagcgcatgctggcttcggccggagaactccaaaaaggaaatgagctggccttgcctagcaagtacgtcaacttcctctatcttgcttcgcactacgaaaaactcaaagggtcaccggaagataacgaacagaagcagcttttcgtggagcagcacaagcattatctggatgaaatcatcgaacaaatctccgagttttcaaagcgcgtgatcctcgccgacgccaacctcgacaaagtcctgtcggcctacaataagcatagagataagccgatcagagaacaggccgagaacattatccacttgttcaccctgactaacctgggagccccagccgccttcaagtacttcgatactactatcgatcgcaaaagatacacgtccaccaaggaagttctggacgcgaccctgatccaccaaagcatcactggactctacgaaactaggatcgatctgtcgcagctgggtggcgatggcggtggatctccgaaaaagaagagaaaggtgtaatgagctagccatcacatttaaaagcatctcagcctaccatgagaataagagaaagaaaatgaagatcaatagcttattcatctctttttctttttcgttggtgtaaagccaacaccctgtctaaaaaacataaatttctttaatcattttgcctcttttctctgtgcttcaattaataaaaaatggaaagaacctcgagaaaaaaaaaaaaaaaaaaaaaaaaaaaaaaaaaaaaaaaaaaaaaaaaaaaaaaaaaaaaaaaaaaaaaaaaaaaaaaaaaaaaaaaaaaaaaaaaaaaatctag

SEQ ID NO: 136 - protein, 7 aa, synthetic construct
  REGION 1..7: note = Synthetic
PKKKRKV

SEQ ID NO: 137 - protein, 7 aa, synthetic construct
  REGION 1..7: note = Synthetic
PKKKRRV

SEQ ID NO: 138 - protein, 16 aa, synthetic construct
  REGION 1..16: note = Synthetic
KRPAATKKAGQAKKKK

SEQ ID NO: 139 - RNA, 16 nt, synthetic construct
  misc_feature 1..16: note = Synthetic
  source 1..16: mol_type = other RNA
gttttagagctatgct

SEQ ID NO: 140 - RNA, 22 nt, synthetic construct
  misc_feature 1..22: note = Synthetic
  source 1..22: mol_type = other RNA
gttttagagctatgctgttttg

SEQ ID NO: 141 - RNA, 67 nt, synthetic construct
  misc_feature 1..67: note = Synthetic
  source 1..67: mol_type = other RNA
agcatagcaagttaaaataaggctagtccgttatcaacttgaaaaagtggcaccgagtcggtgcttt

SEQ ID NO: 142 - RNA, 72 nt, synthetic construct
  misc_feature 1..72: note = Synthetic
  source 1..72: mol_type = other RNA
aaacagcatagcaagttaaaataaggctagtccgttatcaacttgaaaaagtggcaccgagtcggtgctttt

SEQ ID NO: 143 - RNA, 82 nt, synthetic construct
  misc_feature 1..82: note = Synthetic
  source 1..82: mol_type = other RNA
gttggaaccattcaaaacagcatagcaagttaaaataaggctagtccgttatcaacttgaaaaagtggcaccgagtcggtgc

SEQ ID NO: 144 - RNA, 77 nt, synthetic construct
  misc_feature 1..77: note = Synthetic
  source 1..77: mol_type = other RNA
gttttagagctagaaatagcaagttaaaataaggctagtccgttatcaacttgaaaaagtggcaccgagtcggtgct

SEQ ID NO: 145 - RNA, 82 nt, synthetic construct; identical to SEQ ID NO: 143
  misc_feature 1..82: note = Synthetic
  source 1..82: mol_type = other RNA

SEQ ID NO: 146 - RNA, 76 nt, synthetic construct
  misc_feature 1..76: note = Synthetic
  source 1..76: mol_type = other RNA
gttttagagctagaaatagcaagttaaaataaggctagtccgttatcaacttgaaaaagtggcaccgagtcggtgc

SEQ ID NO: 147 - RNA, 86 nt, synthetic construct
  misc_feature 1..86: note = Synthetic
  source 1..86: mol_type = other RNA
gtttaagagctatgctggaaacagcatagcaagtttaaataaggctagtccgttatcaacttgaaaaagtggcaccgagtcggtgc

SEQ ID NO: 148 - RNA, 83 nt, synthetic construct
  misc_feature 1..83: note = Synthetic
  source 1..83: mol_type = other RNA
gttttagagctagaaatagcaagttaaaataaggctagtccgttatcaacttgaaaaagtggcaccgagtcggtgcttttttt

SEQ ID NO: 149 - RNA, 80 nt, synthetic construct
  misc_feature 1..80: note = Synthetic
  source 1..80: mol_type = other RNA
gttttagagctagaaatagcaagttaaaataaggctagtccgttatcaacttgaaaaagtggcaccgagtcggtgctttt

SEQ ID NO: 150 - RNA, 92 nt, synthetic construct
  misc_feature 1..92: note = Synthetic
  source 1..92: mol_type = other RNA
gtttaagagctatgctggaaacagcatagcaagtttaaataaggctagtccgttatcaacttgaaaaagtggcaccgagtcggtgctttttt

SEQ ID NO: 151 - RNA, 68 nt, synthetic construct
  misc_feature 1..68: note = Synthetic
  source 1..68: mol_type = other RNA
gttttagagctagaaatagcaagttaaaataaggctagtccgttatcaacttggcaccgagtcggtgc

SEQ ID NO: 152 - RNA, 100 nt, synthetic construct
  misc_feature 1..100: note = Synthetic
  source 1..100: mol_type = other RNA
  misc_difference 1..20: note = n is a, c, g, or u
nnnnnnnnnnnnnnnnnnnngttttagagctagaaatagcaagttaaaataaggctagtccgttatcaacttgaaaaagtggcaccgagtcggtgctttt

SEQ ID NO: 153 - RNA, 20 nt, synthetic construct
  misc_feature 1..20: note = Synthetic
  source 1..20: mol_type = other RNA
gagcaacctcactcttgtct

SEQ ID NO: 154 - RNA, 20 nt, synthetic construct
  misc_feature 1..20: note = Synthetic
  source 1..20: mol_type = other RNA
atgcatttgtttcaaaatat

SEQ ID NO: 155 - RNA, 20 nt, synthetic construct
  misc_feature 1..20: note = Synthetic
  source 1..20: mol_type = other RNA
tgcatttgtttcaaaatatt

SEQ ID NO: 156 - RNA, 20 nt, synthetic construct
  misc_feature 1..20: note = Synthetic
  source 1..20: mol_type = other RNA
atttatgagatcaacagcac

SEQ ID NO: 157 - RNA, 20 nt, synthetic construct
  misc_feature 1..20: note = Synthetic
  source 1..20: mol_type = other RNA
gatcaacagcacaggttttg

SEQ ID NO: 158 - RNA, 20 nt, synthetic construct
  misc_feature 1..20: note = Synthetic
  source 1..20: mol_type = other RNA
ttaaataaagcatagtgcaa

SEQ ID NO: 159 - RNA, 20 nt, synthetic construct
  misc_feature 1..20: note = Synthetic
  source 1..20: mol_type = other RNA
taaagcatagtgcaatggat

SEQ ID NO: 160 - RNA, 20 nt, synthetic construct
  misc_feature 1..20: note = Synthetic
  source 1..20: mol_type = other RNA
tagtgcaatggataggtctt

SEQ ID NO: 161 - RNA, 20 nt, synthetic construct
  misc_feature 1..20: note = Synthetic
  source 1..20: mol_type = other RNA
tactaaaactttattttact

SEQ ID NO: 162 - RNA, 20 nt, synthetic construct
  misc_feature 1..20: note = Synthetic
  source 1..20: mol_type = other RNA
aaagttgaacaatagaaaaa

SEQ ID NO: 163 - RNA, 20 nt, synthetic construct
  misc_feature 1..20: note = Synthetic
  source 1..20: mol_type = other RNA
aatgcataatctaagtcaaa

SEQ ID NO: 164 - RNA, 20 nt, synthetic construct
  misc_feature 1..20: note = Synthetic
  source 1..20: mol_type = other RNA
taataaaattcaaacatcct

SEQ ID NO: 165 - RNA, 20 nt, synthetic construct
  misc_feature 1..20: note = Synthetic
  source 1..20: mol_type = other RNA
gcatctttaaagaattattt

SEQ ID NO: 166 - RNA, 20 nt, synthetic construct
  misc_feature 1..20: note = Synthetic
  source 1..20: mol_type = other RNA
tttggcatttatttctaaaa

SEQ ID NO: 167 - RNA, 20 nt, synthetic construct
  misc_feature 1..20: note = Synthetic
  source 1..20: mol_type = other RNA
tgtatttgtgaagtcttaca

SEQ ID NO: 168 - RNA, 20 nt, synthetic construct
  misc_feature 1..20: note = Synthetic
  source 1..20: mol_type = other RNA
tcctaggtaaaaaaaaaaaa

SEQ ID NO: 169 - RNA, 20 nt, synthetic construct
  misc_feature 1..20: note = Synthetic
  source 1..20: mol_type = other RNA
taattttcttttgcgcacta

SEQ ID NO: 170 - RNA, 20 nt, synthetic construct
  misc_feature 1..20: note = Synthetic
  source 1..20: mol_type = other RNA
tgactgaaacttcacagaat

SEQ ID NO: 171 - RNA, 20 nt, synthetic construct
  misc_feature 1..20: note = Synthetic
  source 1..20: mol_type = other RNA
gactgaaacttcacagaata

SEQ ID NO: 172 - RNA, 20 nt, synthetic construct
  misc_feature 1..20: note = Synthetic
  source 1..20: mol_type = other RNA
ttcattttagtctgtcttct

SEQ ID NO: 173 - RNA, 20 nt, synthetic construct
  misc_feature 1..20: note = Synthetic
  source 1..20: mol_type = other RNA
attatctaagtttgaatata

SEQ ID NO: 174 - RNA, 20 nt, synthetic construct
  misc_feature 1..20: note = Synthetic
  source 1..20: mol_type = other RNA
aatttttaaaatagtattct

SEQ ID NO: 175 - RNA, 20 nt, synthetic construct
  misc_feature 1..20: note = Synthetic
  source 1..20: mol_type = other RNA
tgaattattcttctgtttaa

SEQ ID NO: 176 - RNA, 20 nt, synthetic construct
  misc_feature 1..20: note = Synthetic
  source 1..20: mol_type = other RNA
atcatcctgagtttttctgt

SEQ ID NO: 177 - RNA, 20 nt, synthetic construct
  misc_feature 1..20: note = Synthetic
  source 1..20: mol_type = other RNA
ttactaaaactttattttac

SEQ ID NO: 178 - RNA, 20 nt, synthetic construct
  misc_feature 1..20: note = Synthetic
  source 1..20: mol_type = other RNA
acctttttttttttttacct

SEQ ID NO: 179 - RNA, 20 nt, synthetic construct
  misc_feature 1..20: note = Synthetic
  source 1..20: mol_type = other RNA
agtgcaatggataggtcttt

SEQ ID NO: 180 - RNA, 20 nt, synthetic construct
  misc_feature 1..20: note = Synthetic
  source 1..20: mol_type = other RNA
tgattcctacagaaaaactc

SEQ ID NO: 181 - RNA, 20 nt, synthetic construct
  misc_feature 1..20: note = Synthetic
  source 1..20: mol_type = other RNA
tgggcaagggaagaaaaaaa

SEQ ID NO: 182 - RNA, 20 nt, synthetic construct
  misc_feature 1..20: note = Synthetic
  source 1..20: mol_type = other RNA
cctcactcttgtctgggcaa

SEQ ID NO: 183 - RNA, 20 nt, synthetic construct
  misc_feature 1..20: note = Synthetic
  source 1..20: mol_type = other RNA
acctcactcttgtctgggca

SEQ ID NO: 184 - RNA, 20 nt, synthetic construct
  misc_feature 1..20: note = Synthetic
  source 1..20: mol_type = other RNA
tgagcaacctcactcttgtc

SEQ ID NO: 185 - RNA, 100 nt, synthetic construct
  misc_feature 1..100: note = Synthetic
  source 1..100: mol_type = other RNA
gagcaacctcactcttgtctgttttagagctagaaatagcaagttaaaataaggctagtccgttatcaacttgaaaaagtggcaccgagtcggtgctttt

SEQ ID NO: 186 - RNA, 100 nt, synthetic construct
  misc_feature 1..100: note = Synthetic
  source 1..100: mol_type = other RNA
atgcatttgtttcaaaatatgttttagagctagaaatagcaagttaaaataaggctagtccgttatcaacttgaaaaagtggcaccgagtcggtgctttt

SEQ ID NO: 187 - RNA, 100 nt, synthetic construct
  misc_feature 1..100: note = Synthetic
  source 1..100: mol_type = other RNA
tgcatttgtttcaaaatattgttttagagctagaaatagcaagttaaaataaggctagtccgttatcaacttgaaaaagtggcaccgagtcggtgctttt

SEQ ID NO: 188 - RNA, 100 nt, synthetic construct
  misc_feature 1..100: note = Synthetic
  source 1..100: mol_type = other RNA
atttatgagatcaacagcacgttttagagctagaaatagcaagttaaaataaggctagtccgttatcaacttgaaaaagtggcaccgagtcggtgctttt

SEQ ID NO: 189 - RNA, 100 nt, synthetic construct
  misc_feature 1..100: note = Synthetic
  source 1..100: mol_type = other RNA
gatcaacagcacaggttttggttttagagctagaaatagcaagttaaaataaggctagtccgttatcaacttgaaaaagtggcaccgagtcggtgctttt

SEQ ID NO: 190 - RNA, 100 nt, synthetic construct
  misc_feature 1..100: note = Synthetic
  source 1..100: mol_type = other RNA
ttaaataaagcatagtgcaagttttagagctagaaatagcaagttaaaataaggctagtccgttatcaacttgaaaaagtggcaccgagtcggtgctttt

SEQ ID NO: 191 - RNA, 100 nt, synthetic construct
  misc_feature 1..100: note = Synthetic
  source 1..100: mol_type = other RNA
taaagcatagtgcaatggatgttttagagctagaaatagcaagttaaaataaggctagtccgttatcaacttgaaaaagtggcaccgagtcggtgctttt

SEQ ID NO: 192 - RNA, 100 nt, synthetic construct
  misc_feature 1..100: note = Synthetic
  source 1..100: mol_type = other RNA
tagtgcaatggataggtcttgttttagagctagaaatagcaagttaaaataaggctagtccgttatcaacttgaaaaagtggcaccgagtcggtgctttt

SEQ ID NO: 193 - RNA, 100 nt, synthetic construct
  misc_feature 1..100: note = Synthetic
  source 1..100: mol_type = other RNA
tactaaaactttattttactgttttagagctagaaatagcaagttaaaataaggctagtccgttatcaacttgaaaaagtggcaccgagtcggtgctttt

SEQ ID NO: 194 - RNA, 100 nt, synthetic construct
  misc_feature 1..100: note = Synthetic
  source 1..100: mol_type = other RNA
aaagttgaacaatagaaaaagttttagagctagaaatagcaagttaaaataaggctagtccgttatcaacttgaaaaagtggcaccgagtcggtgctttt

SEQ ID NO: 195 - RNA, 100 nt, synthetic construct
  misc_feature 1..100: note = Synthetic
  source 1..100: mol_type = other RNA
aatgcataatctaagtcaaagttttagagctagaaatagcaagttaaaataaggctagtccgttatcaacttgaaaaagtggcaccgagtcggtgctttt

SEQ ID NO: 196 - RNA, 100 nt, synthetic construct
  misc_feature 1..100: note = Synthetic
  source 1..100: mol_type = other RNA
taataaaattcaaacatcctgttttagagctagaaatagcaagttaaaataaggctagtccgttatcaacttgaaaaagtggcaccgagtcggtgctttt

SEQ ID NO: 197 - RNA, 100 nt, synthetic construct
  misc_feature 1..100: note = Synthetic
  source 1..100: mol_type = other RNA
gcatctttaaagaattatttgttttagagctagaaatagcaagttaaaataaggctagtccgttatcaacttgaaaaagtggcaccgagtcggtgctttt

SEQ ID NO: 198 - RNA, 100 nt, synthetic construct
  misc_feature 1..100: note = Synthetic
  source 1..100: mol_type = other RNA
tttggcatttatttctaaaagttttagagctagaaatagcaagttaaaataaggctagtccgttatcaacttgaaaaagtggcaccgagtcggtgctttt

SEQ ID NO: 199 - RNA, 100 nt, synthetic construct
  misc_feature 1..100: note = Synthetic
  source 1..100: mol_type = other RNA
tgtatttgtgaagtcttacagttttagagctagaaatagcaagttaaaataaggctagtccgttatcaacttgaaaaagtggcaccgagtcggtgctttt

SEQ ID NO: 200 - RNA, 100 nt, synthetic construct
  misc_feature 1..100: note = Synthetic
  source 1..100: mol_type = other RNA
tcctaggtaaaaaaaaaaaagttttagagctagaaatagcaagttaaaataaggctagtccgttatcaacttgaaaaagtggcaccgagtcggtgctttt

SEQ ID NO: 201 - RNA, 100 nt, synthetic construct
  misc_feature 1..100: note = Synthetic
  source 1..100: mol_type = other RNA
taattttcttttgcgcactagttttagagctagaaatagcaagttaaaataaggctagtccgttatcaacttgaaaaagtggcaccgagtcggtgctttt

SEQ ID NO: 202 - RNA, 100 nt, synthetic construct
  misc_feature 1..100: note = Synthetic
  source 1..100: mol_type = other RNA
tgactgaaacttcacagaatgttttagagctagaaatagcaagttaaaataaggctagtccgttatcaacttgaaaaagtggcaccgagtcggtgctttt

SEQ ID NO: 203 - RNA, 100 nt, synthetic construct
  misc_feature 1..100: note = Synthetic
  source 1..100: mol_type = other RNA
gactgaaacttcacagaatagttttagagctagaaatagcaagttaaaataaggctagtccgttatcaacttgaaaaagtggcaccgagtcggtgctttt

SEQ ID NO: 204 - RNA, 100 nt, synthetic construct
  misc_feature 1..100: note = Synthetic
  source 1..100: mol_type = other RNA
ttcattttagtctgtcttctgttttagagctagaaatagcaagttaaaataaggctagtccgttatcaacttgaaaaagtggcaccgagtcggtgctttt

SEQ ID NO: 205 - RNA, 100 nt, synthetic construct
  misc_feature 1..100: note = Synthetic
  source 1..100: mol_type = other RNA
attatctaagtttgaatatagttttagagctagaaatagcaagttaaaataaggctagtccgttatcaacttgaaaaagtggcaccgagtcggtgctttt

SEQ ID NO: 206 - RNA, 100 nt, synthetic construct
  misc_feature 1..100: note = Synthetic
  source 1..100: mol_type = other RNA
aatttttaaaatagtattctgttttagagctagaaatagcaagttaaaataaggctagtccgttatcaacttgaaaaagtggcaccgagtcggtgctttt

SEQ ID NO: 207 - RNA, 100 nt, synthetic construct
  misc_feature 1..100: note = Synthetic
  source 1..100: mol_type = other RNA
tgaattattcttctgtttaagttttagagctagaaatagcaagttaaaataaggctagtccgttatcaacttgaaaaagtggcaccgagtcggtgctttt

SEQ ID NO: 208 - RNA, 100 nt, synthetic construct
  misc_feature 1..100: note = Synthetic
  source 1..100: mol_type = other RNA
atcatcctgagtttttctgtgttttagagctagaaatagcaagttaaaataaggctagtccgttatcaacttgaaaaagtggcaccgagtcggtgctttt

SEQ ID NO: 209 - RNA, 100 nt, synthetic construct
  misc_feature 1..100: note = Synthetic
  source 1..100: mol_type = other RNA
ttactaaaactttattttacgttttagagctagaaatagcaagttaaaataaggctagtccgttatcaacttgaaaaagtggcaccgagtcggtgctttt

SEQ ID NO: 210 - RNA, 100 nt, synthetic construct
  misc_feature 1..100: note = Synthetic
  source 1..100: mol_type = other RNA
acctttttttttttttacctgttttagagctagaaatagcaagttaaaataaggctagtccgttatcaacttgaaaaagtggcaccgagtcggtgctttt

SEQ ID NO: 211 - RNA, 100 nt, synthetic construct
  misc_feature 1..100: note = Synthetic
  source 1..100: mol_type = other RNA
agtgcaatggataggtctttgttttagagctagaaatagcaagttaaaataaggctagtccgttatcaacttgaaaaagtggcaccgagtcggtgctttt

SEQ ID NO: 212 - RNA, 100 nt, synthetic construct
  misc_feature 1..100: note = Synthetic
  source 1..100: mol_type = other RNA
tgattcctacagaaaaactcgttttagagctagaaatagcaagttaaaataaggctagtccgttatcaacttgaaaaagtggcaccgagtcggtgctttt

SEQ ID NO: 213 - RNA, 100 nt, synthetic construct
  misc_feature 1..100: note = Synthetic
  source 1..100: mol_type = other RNA
tgggcaagggaagaaaaaaagttttagagctagaaatagcaagttaaaataaggctagtccgttatcaacttgaaaaagtggcaccgagtcggtgctttt

SEQ ID NO: 214 - RNA, 100 nt, synthetic construct
  misc_feature 1..100: note = Synthetic
  source 1..100: mol_type = other RNA
cctcactcttgtctgggcaagttttagagctagaaatagcaagttaaaataaggctagtccgttatcaacttgaaaaagtggcaccgagtcggtgctttt

SEQ ID NO: 215 - RNA, 100 nt, synthetic construct
  misc_feature 1..100: note = Synthetic
  source 1..100: mol_type = other RNA
acctcactcttgtctgggcagttttagagctagaaatagcaagttaaaataaggctagtccgttatcaacttgaaaaagtggcaccgagtcggtgctttt

SEQ ID NO: 216 - RNA, 100 nt, synthetic construct
  misc_feature 1..100: note = Synthetic
  source 1..100: mol_type = other RNA
tgagcaacctcactcttgtcgttttagagctagaaatagcaagttaaaataaggctagtccgttatcaacttgaaaaagtggcaccgagtcggtgctttt

SEQ ID NO: 217 - RNA, 100 nt, synthetic construct; identical to SEQ ID NO: 185
  misc_feature 1..100: note = Synthetic
  source 1..100: mol_type = other RNA

SEQ ID NO: 218 - RNA, 100 nt, synthetic construct; identical to SEQ ID NO: 186
  misc_feature 1..100: note = Synthetic
  source 1..100: mol_type = other RNA

SEQ ID NO: 219 - RNA, 100 nt, synthetic construct; identical to SEQ ID NO: 187
  misc_feature 1..100: note = Synthetic
  source 1..100: mol_type = other RNA

SEQ ID NO: 220 - RNA, 100 nt, synthetic construct; identical to SEQ ID NO: 188
  misc_feature 1..100: note = Synthetic
  source 1..100: mol_type = other RNA

SEQ ID NO: 221 - RNA, 100 nt, synthetic construct; identical to SEQ ID NO: 189
  misc_feature 1..100: note = Synthetic
  source 1..100: mol_type = other RNA

SEQ ID NO: 222 - RNA, 100 nt, synthetic construct; identical to SEQ ID NO: 190
  misc_feature 1..100: note = Synthetic
  source 1..100: mol_type = other RNA

SEQ ID NO: 223 - RNA, 100 nt, synthetic construct; identical to SEQ ID NO: 191
  misc_feature 1..100: note = Synthetic
  source 1..100: mol_type = other RNA

SEQ ID NO: 224 - RNA, 100 nt, synthetic construct; identical to SEQ ID NO: 192
  misc_feature 1..100: note = Synthetic
  source 1..100: mol_type = other RNA

SEQ ID NO: 225 - RNA, 100 nt, synthetic construct; identical to SEQ ID NO: 193
  misc_feature 1..100: note = Synthetic
  source 1..100: mol_type = other RNA

SEQ ID NO: 226 - RNA, 100 nt, synthetic construct; identical to SEQ ID NO: 194
  misc_feature 1..100: note = Synthetic
  source 1..100: mol_type = other RNA

SEQ ID NO: 227 - RNA, 100 nt, synthetic construct; identical to SEQ ID NO: 195
  misc_feature 1..100: note = Synthetic
  source 1..100: mol_type = other RNA

SEQ ID NO: 228 - RNA, 100 nt, synthetic construct; identical to SEQ ID NO: 196
  misc_feature 1..100: note = Synthetic
  source 1..100: mol_type = other RNA

SEQ ID NO: 229 - RNA, 100 nt, synthetic construct; identical to SEQ ID NO: 197
  misc_feature 1..100: note = Synthetic
  source 1..100: mol_type = other RNA

SEQ ID NO: 230 - RNA, 100 nt, synthetic construct; identical to SEQ ID NO: 198
  misc_feature 1..100: note = Synthetic
  source 1..100: mol_type = other RNA

SEQ ID NO: 231 - RNA, 100 nt, synthetic construct; identical to SEQ ID NO: 199
  misc_feature 1..100: note = Synthetic
  source 1..100: mol_type = other RNA

SEQ ID NO: 232 - RNA, 100 nt, synthetic construct; identical to SEQ ID NO: 200
  misc_feature 1..100: note = Synthetic
  source 1..100: mol_type = other RNA

SEQ ID NO: 233 - RNA, 100 nt, synthetic construct; identical to SEQ ID NO: 201
  misc_feature 1..100: note = Synthetic
  source 1..100: mol_type = other RNA

SEQ ID NO: 234 - RNA, 100 nt, synthetic construct; identical to SEQ ID NO: 202
  misc_feature 1..100: note = Synthetic
  source 1..100: mol_type = other RNA

SEQ ID NO: 235 - RNA, 100 nt, synthetic construct; identical to SEQ ID NO: 203
  misc_feature 1..100: note = Synthetic
  source 1..100: mol_type = other RNA

SEQ ID NO: 236 - RNA, 100 nt, synthetic construct; identical to SEQ ID NO: 204
  misc_feature 1..100: note = Synthetic
  source 1..100: mol_type = other RNA

SEQ ID NO: 237 - RNA, 100 nt, synthetic construct; identical to SEQ ID NO: 205
  misc_feature 1..100: note = Synthetic
  source 1..100: mol_type = other RNA

SEQ ID NO: 238 - RNA, 100 nt, synthetic construct; identical to SEQ ID NO: 206
  misc_feature 1..100: note = Synthetic
  source 1..100: mol_type = other RNA

SEQ ID NO: 239 - RNA, 100 nt, synthetic construct; identical to SEQ ID NO: 207
  misc_feature 1..100: note = Synthetic
  source 1..100: mol_type = other RNA

SEQ ID NO: 240 - RNA, 100 nt, synthetic construct; identical to SEQ ID NO: 208
  misc_feature 1..100: note = Synthetic
  source 1..100: mol_type = other RNA

SEQ ID NO: 241 - RNA, 100 nt, synthetic construct; identical to SEQ ID NO: 209
  misc_feature 1..100: note = Synthetic
  source 1..100: mol_type = other RNA

SEQ ID NO: 242 - RNA, 100 nt, synthetic construct; identical to SEQ ID NO: 210
  misc_feature 1..100: note = Synthetic
  source 1..100: mol_type = other RNA

SEQ ID NO: 243 - RNA, 100 nt, synthetic construct; identical to SEQ ID NO: 211
  misc_feature 1..100: note = Synthetic
  source 1..100: mol_type = other RNA

SEQ ID NO: 244 - RNA, 100 nt, synthetic construct; identical to SEQ ID NO: 212
  misc_feature 1..100: note = Synthetic
  source 1..100: mol_type = other RNA

SEQ ID NO: 245 - RNA, 100 nt, synthetic construct; identical to SEQ ID NO: 213
  misc_feature 1..100: note = Synthetic
  source 1..100: mol_type = other RNA

SEQ ID NO: 246 - RNA, 100 nt, synthetic construct; identical to SEQ ID NO: 214
  misc_feature 1..100: note = Synthetic
  source 1..100: mol_type = other RNA

SEQ ID NO: 247 - RNA, 100 nt, synthetic construct; identical to SEQ ID NO: 215
  misc_feature 1..100: note = Synthetic
  source 1..100: mol_type = other RNA

SEQ ID NO: 248 - RNA, 100 nt, synthetic construct; identical to SEQ ID NO: 216
  misc_feature 1..100: note = Synthetic
  source 1..100: mol_type = other RNA

SEQ ID NO: 249 - DNA, 20 bp, synthetic construct
  misc_feature 1..20: note = Synthetic
  source 1..20: mol_type = other DNA
gagcaacctcactcttgtct

SEQ ID NO: 250 - DNA, 20 bp, synthetic construct
  misc_feature 1..20: note = Synthetic
  source 1..20: mol_type = other DNA
atgcatttgtttcaaaatat

SEQ ID NO: 251 - DNA, 20 bp, synthetic construct
  misc_feature 1..20: note = Synthetic
  source 1..20: mol_type = other DNA
tgcatttgtttcaaaatatt

SEQ ID NO: 252 - DNA, 20 bp, synthetic construct
  misc_feature 1..20: note = Synthetic
  source 1..20: mol_type = other DNA
atttatgagatcaacagcac

SEQ ID NO: 253 - DNA, 20 bp, synthetic construct
  misc_feature 1..20: note = Synthetic
  source 1..20: mol_type = other DNA
gatcaacagcacaggttttg

SEQ ID NO: 254 - DNA, 20 bp, synthetic construct
  misc_feature 1..20: note = Synthetic
  source 1..20: mol_type = other DNA
ttaaataaagcatagtgcaa

SEQ ID NO: 255 - DNA, 20 bp, synthetic construct
  misc_feature 1..20: note = Synthetic
  source 1..20: mol_type = other DNA
taaagcatagtgcaatggat

SEQ ID NO: 256 - DNA, 20 bp, synthetic construct
  misc_feature 1..20: note = Synthetic
  source 1..20: mol_type = other DNA
tagtgcaatggataggtctt

SEQ ID NO: 257 - DNA, 20 bp, synthetic construct
  misc_feature 1..20: note = Synthetic
  source 1..20: mol_type = other DNA
tactaaaactttattttact

SEQ ID NO: 258 - DNA, 20 bp, synthetic construct
  misc_feature 1..20: note = Synthetic
  source 1..20: mol_type = other DNA
aaagttgaacaatagaaaaa

SEQ ID NO: 259 - DNA, 20 bp, synthetic construct
  misc_feature 1..20: note = Synthetic
  source 1..20: mol_type = other DNA
aatgcataatctaagtcaaa

SEQ ID NO: 260 - DNA, 20 bp, synthetic construct
  misc_feature 1..20: note = Synthetic
  source 1..20: mol_type = other DNA
taataaaattcaaacatcct

SEQ ID NO: 261 - DNA, 20 bp, synthetic construct
  misc_feature 1..20: note = Synthetic
  source 1..20: mol_type = other DNA
gcatctttaaagaattattt

SEQ ID NO: 262 - DNA, 20 bp, synthetic construct
  misc_feature 1..20: note = Synthetic
  source 1..20: mol_type = other DNA
tttggcatttatttctaaaa

SEQ ID NO: 263 - DNA, 20 bp, synthetic construct
  misc_feature 1..20: note = Synthetic
  source 1..20: mol_type = other DNA
tgtatttgtgaagtcttaca

SEQ ID NO: 264 - DNA, 20 bp, synthetic construct
  misc_feature 1..20: note = Synthetic
  source 1..20: mol_type = other DNA
tcctaggtaaaaaaaaaaaa

SEQ ID NO: 265 - DNA, 20 bp, synthetic construct
  misc_feature 1..20: note = Synthetic
  source 1..20: mol_type = other DNA
taattttcttttgcgcacta

SEQ ID NO: 266 - DNA, 20 bp, synthetic construct
  misc_feature 1..20: note = Synthetic
  source 1..20: mol_type = other DNA
tgactgaaacttcacagaat

SEQ ID NO: 267 - DNA, 20 bp, synthetic construct
  misc_feature 1..20: note = Synthetic
  source 1..20: mol_type = other DNA
gactgaaacttcacagaata

SEQ ID NO: 268 - DNA, 20 bp, synthetic construct
  misc_feature 1..20: note = Synthetic
  source 1..20: mol_type = other DNA
ttcattttagtctgtcttct

SEQ ID NO: 269 - DNA, 20 bp, synthetic construct
  misc_feature 1..20: note = Synthetic
  source 1..20: mol_type = other DNA
attatctaagtttgaatata

SEQ ID NO: 270 - DNA, 20 bp, synthetic construct
  misc_feature 1..20: note = Synthetic
  source 1..20: mol_type = other DNA
aatttttaaaatagtattct

SEQ ID NO: 271 - DNA, 20 bp, synthetic construct
  misc_feature 1..20: note = Synthetic
  source 1..20: mol_type = other DNA
tgaattattcttctgtttaa

SEQ ID NO: 272 - DNA, 20 bp, synthetic construct
  misc_feature 1..20: note = Synthetic
  source 1..20: mol_type = other DNA
atcatcctgagtttttctgt

SEQ ID NO: 273 - DNA, 20 bp, synthetic construct
  misc_feature 1..20: note = Synthetic
  source 1..20: mol_type = other DNA
ttactaaaactttattttac

SEQ ID NO: 274 - DNA, 20 bp, synthetic construct
  misc_feature 1..20: note = Synthetic
  source 1..20: mol_type = other DNA
acctttttttttttttacct

SEQ ID NO: 275 - DNA, 20 bp, synthetic construct
  misc_feature 1..20: note = Synthetic
  source 1..20: mol_type = other DNA
agtgcaatggataggtcttt

SEQ ID NO: 276 - DNA, 20 bp, synthetic construct
  misc_feature 1..20: note = Synthetic
  source 1..20: mol_type = other DNA
tgattcctacagaaaaactc

SEQ ID NO: 277 - DNA, 20 bp, synthetic construct
  misc_feature 1..20: note = Synthetic
  source 1..20: mol_type = other DNA
tgggcaagggaagaaaaaaa

SEQ ID NO: 278 - DNA, 20 bp, synthetic construct
  misc_feature 1..20: note = Synthetic
  source 1..20: mol_type = other DNA
cctcactcttgtctgggcaa

SEQ ID NO: 279 - DNA, 20 bp, synthetic construct
  misc_feature 1..20: note = Synthetic
  source 1..20: mol_type = other DNA
acctcactcttgtctgggca

SEQ ID NO: 280 - DNA, 20 bp, synthetic construct
  misc_feature 1..20: note = Synthetic
  source 1..20: mol_type = other DNA
tgagcaacctcactcttgtc

SEQ ID NO: 281 - DNA, 145 bp, synthetic construct
  misc_feature 1..145: note = Synthetic
  source 1..145: mol_type = other DNA
ttggccactccctctctgcgcgctcgctcgctcactgaggccgggcgaccaaaggtcgcccgacgcccgggctttgcccgggcggcctcagtgagcgagcgagcgcgcagagagggagtggccaactccatcactaggggttcct

SEQ ID NO: 282 - DNA, 141 bp, synthetic construct
  misc_feature 1..141: note = Synthetic
  source 1..141: mol_type = other DNA
cctgcaggcagctgcgcgctcgctcgctcactgaggccgcccgggcaaagcccgggcgtcgggcgacctttggtcgcccggcctcagtgagcgagcgagcgcgcagagagggagtggccaactccatcactaggggttcct

SEQ ID NO: 283 - DNA, 130 bp, synthetic construct
  misc_feature 1..130: note = Synthetic
  source 1..130: mol_type = other DNA
ctgcgcgctcgctcgctcactgaggccgcccgggcaaagcccgggcgtcgggcgacctttggtcgcccggcctcagtgagcgagcgagcgcgcagagagggagtggccaactccatcactaggggttcct

SEQ ID NO: 284 - DNA, 131 bp, synthetic construct; identical to SEQ ID NO: 98
  misc_feature 1..131: note = Synthetic
  source 1..131: mol_type = other DNA

SEQ ID NO: 285 - DNA, 224 bp, synthetic construct; identical to SEQ ID NO: 99
  misc_feature 1..224: note = Synthetic
  source 1..224: mol_type = other DNA

SEQ ID NO: 286 - DNA, 100 bp, synthetic construct; identical to SEQ ID NO: 100
  misc_feature 1..100: note = Synthetic
  source 1..100: mol_type = other DNA

SEQ ID NO: 287 - RNA, 20 nt, synthetic construct
  misc_feature 1..20: note = Synthetic
  source 1..20: mol_type = other RNA
cactcttgtctgtggaaaca

SEQ ID NO: 288 - DNA, 20 bp, synthetic construct
  misc_feature 1..20: note = Synthetic
  source 1..20: mol_type = other DNA
cactcttgtctgtggaaaca

SEQ ID NO: 289 - RNA, 100 nt, synthetic construct
  misc_feature 1..100: note = Synthetic
  source 1..100: mol_type = other RNA
cactcttgtctgtggaaacagttttagagctagaaatagcaagttaaaataaggctagtccgttatcaacttgaaaaagtggcaccgagtcggtgctttt

SEQ ID NO: 290 - RNA, 100 nt, synthetic construct; identical to SEQ ID NO: 289
  misc_feature 1..100: note = Synthetic
  source 1..100: mol_type = other RNA

SEQ ID NO: 291 - DNA, 145 bp, synthetic construct
  misc_feature 1..145: note = Synthetic
  source 1..145: mol_type = other DNA
aggaacccctagtgatggagttggccactccctctctgcgcgctcgctcgctcactgaggccgcccgggcaaagcccgggcgtcgggcgacctttggtcgcccggcctcagtgagcgagcgagcgcgcagagagggagtggccaa

SEQ ID NO: 292 - DNA, 230 bp, synthetic construct
  misc_feature 1..230: note = Synthetic
  source 1..230: mol_type = other DNA
taatcagccataccacatttgtagaggttttacttgctttaaaaaacctcccacacctccccctgaacctgaaacataaaatgaatgcaattgttgttgttaacttgtttattgcagcttataatggttacaaataaagcaatagcatcacaaatttcacaaataaagcatttttttcactgcattctagttgtggtttgtccaaactcatcaatgtatcttatcatgtc

SEQ ID NO: 293 - protein, 952 aa, Homo sapiens
MGVRHPPCSHRLLAVCALVSLATAALLGHILLHDFLLVPRELSGSSPVLEETHPAHQQGASRPGPRDAQAHPGRPRAVPTQCDVPPNSRFDCAPDKAITQEQCEARGCCYIPAKQGLQGAQMGQPWCFFPPSYPSYKLENLSSSEMGYTATLTRTTPTFFPKDILTLRLDVMMETENRLHFTIKDPANRRYEVPLETPHVHSRAPSPLYSVEFSEEPFGVIVRRQLDGRVLLNTTVAPLFFADQFLQLSTSLPSQYITGLAEHLSPLMLSTSWTRITLWNRDLAPTPGANLYGSHPFYLALEDGGSAHGVFLLNSNAMDVVLQPSPALSWRSTGGILDVYIFLGPEPKSVVQQYLDVVGYPFMPPYWGLGFHLCRWGYSSTAITRQVVENMTRAHFPLDVQWNDLDYMDSRRDFTFNKDGFRDFPAMVQELHQGGRRYMMIVDPAISSSGPAGSYRPYDEGLRRGVFITNETGQPLIGKVWPGSTAFPDFTNPTALAWWEDMVAEFHDQVPFDGMWIDMNEPSNFIRGSEDGCPNNELENPPYVPGVVGGTLQAATICASSHQFLSTHYNLHNLYGLTEAIASHRALVKARGTRPFVISRSTFAGHGRYAGHWTGDVWSSWEQLASSVPEILQFNLLGVPLVGADVCGFLGNTSEELCVRWTQLGAFYPFMRNHNSLLSLPQEPYSFSEPAQQAMRKALTLRYALLPHLYTLFHQAHVAGETVARPLFLEFPKDSSTWTVDHQLLWGEALLITPVLQAGKAEVTGYFPLGTWYDLQTVPVEALGSLPPPPAAPREPAIHSEGQWVTLPAPLDTINVHLRAGYIIPLQGPGLTTTESRQQPMALAVALTKGGEARGELFWDDGESLEVLERGAYTQVIFLARNNTIVNELVRVTSEGAGLQLQKVTVLGVATAPQQVLSNGVPVSNFTYSPDTKVLDICVSLLMGEQFLVSWC

SEQ ID NO: 294 - DNA, 3751 bp, Homo sapiens
  source 1..3751: mol_type = other DNA
cgaccccggagtctccgcgggcggccagggcgcgcgtgcgcggaggtgagccgggccggggctgcggggcttccctgagcgcgggccgggtcggtggggcggtcggctgcccgcgcggcctctcagttgggaaagctgaggttgtcgccggggccgcgggtggaggtcggggatgaggcagcaggtaggacagtgacctcggtgacgcgaaggaccccggccacctctaggttctcctcgtccgcccgttgttcagcgagggaggctctgcgcgtgccgcagctgacggggaaactgaggcacggagcgggcctgtaggagctgtccaggccatctccaaccatgggagtgaggcacccgccctgctcccaccggctcctggccgtctgcgccctcgtgtccttggcaaccgctgcactcctggggcacatcctactccatgatttcctgctggttccccgagagctgagtggctcctccccagtcctggaggagactcacccagctcaccagcagggagccagcagaccagggccccgggatgcccaggcacaccccggccgtcccagagcagtgcccacacagtgcgacgtcccccccaacagccgcttcgattgcgcccctgacaaggccatcacccaggaacagtgcgaggcccgcggctgttgctacatccctgcaaagcaggggctgcagggagcccagatggggcagccctggtgcttcttcccacccagctaccccagctacaagctggagaacctgagctcctctgaaatgggctacacggccaccctgacccgtaccacccccaccttcttccccaaggacatcctgaccctgcggctggacgtgatgatggagactgagaaccgcctccacttcacgatcaaagatccagctaacaggcgctacgaggtgcccttggagaccccgcatgtccacagccgggcaccgtccccactctacagcgtggagttctccgaggagcccttcggggtgatcgtgcgccggcagctggacggccgcgtgctgctgaacacgacggtggcgcccctgttctttgcggaccagttccttcagctgtccacctcgctgccctcgcagtatatcacaggcctcgccgagcacctcagtcccctgatgctcagcaccagctggaccaggatcaccctgtggaaccgggaccttgcgcccacgcccggtgcgaacctctacgggtctcaccctttctacctggcgctggaggacggcgggtcggcacacggggtgttcctgctaaacagcaatgccatggatgtggtcctgcagccgagccctgcccttagctggaggtcgacaggtgggatcctggatgtctacatcttcctgggcccagagcccaagagcgtggtgcagcagtacctggacgttgtgggatacccgttcatgccgccatactggggcctgggcttccacctgtgccgctggggctactcctccaccgctatcacccgccaggtggtggagaacatgaccagggcccacttccccctggacgtccagtggaacgacctggactacatggactcccggagggacttcacgttcaacaaggatggcttccgggacttcccggccatggtgcaggagctgcaccagggcggccggcgctacatgatgatcgtggatcctgccatcagcagctcgggccctgccgggagctacaggccctacgacgagggtctgcggaggggggttttcatcaccaacgagaccggccagccgctgattgggaaggtatggcccgggtccactgccttccccgacttcaccaaccccacagccctggcctggtgggaggacatggtggctgagttccatgaccaggtgcccttcgacggcatgtggattgacatgaacgagccttccaacttcatcaggggctctgaggacggctgccccaacaatgagctggagaacccaccctacgtgcctggggtggttggggggaccctccaggcggccaccatctgtgcctccagccaccagtttctctccacacactacaacctgcacaacctctacggcctgaccgaagccatcgcctcccacagggcgctggtgaaggctcgggggacacgcccatttgtgatctcccgctcgacctttgctggccacggccgatacgccggccactggacgggggacgtgtggagctcctgggagcagctcgcctcctccgtgccagaaatcctgcagtttaacctgctgggggtgcctctggtcggggccgacgtctgcggcttcctgggcaacacctcagaggagctgtgtgtgcgctggacccagctgggggccttctaccccttcatgcggaaccacaacagcctgctcagtctgccccaggagccgtacagcttcagcgagccggcccagcaggccatgaggaaggccctcaccctgcgctacgcactcctcccccacctctacacactgttccaccaggcccacgtcgcgggggagaccgtggcccggcccctcttcctggagttccccaaggactctagcacctggactgtggaccaccagctcctgtggggggaggccctgctcatcaccccagtgctccaggccgggaaggccgaagtgactggctacttccccttgggcacatggtacgacctgcagacggtgccagtagaggcccttggcagcctcccacccccacctgcagctccccgtgagccagccatccacagcgaggggcagtgggtgacgctgccggcccccctggacaccatcaacgtccacctccgggctgggtacatcatccccctgcagggccctggcctcacaaccacagagtcccgccagcagcccatggccctggctgtggccctgaccaagggtggggaggcccgaggggagctgttctgggacgatggagagagcctggaagtgctggagcgaggggcctacacacaggtcatcttcctggccaggaataacacgatcgtgaatgagctggtacgtgtgaccagtgagggagctggcctgcagctgcagaaggtgactgtcctgggcgtggccacggcgccccagcaggtcctctccaacggtgtccctgtctccaacttcacctacagccccgacaccaaggtcctggacatctgtgtctcgctgttgatgggagagcagtttctcgtcagctggtgttagccgggcggagtgtgttagtctctccagagggaggctggttccccagggaagcagagcctgtgtgcgggcagcagctgtgtgcgggcctgggggttgcatgtgtcacctggagctgggcactaaccattccaagccgccgcatcgcttgtttccacctcctgggccggggctctggcccccaacgtgtctaggagagctttctccctagatcgcactgtgggccggggccctggagggctgctctgtgttaataagattgtaaggtttgccctcctcacctgttgccggcatgcgggtagtattagccacccccctccatctgttcccagcaccggagaagggggtgctcaggtggaggtgtggggtatgcacctgagctcctgcttcgcgcctgctgctctgccccaacgcgaccgctgcccggctgcccagagggctggatgcctgccggtccccgagcaagcctgggaactcaggaaaattcacaggacttgggagattctaaatcttaagtgcaattatttttaataaaaggggcatttggaatcag

SEQ ID NO: 295 - DNA, 2859 bp, Homo sapiens
  source 1..2859: mol_type = other DNA
atgggagtgaggcacccgccctgctcccaccggctcctggccgtctgcgccctcgtgtccttggcaaccgctgcactcctggggcacatcctactccatgatttcctgctggttccccgagagctgagtggctcctccccagtcctggaggagactcacccagctcaccagcagggagccagcagaccagggccccgggatgcccaggcacaccccggccgtcccagagcagtgcccacacagtgcgacgtcccccccaacagccgcttcgattgcgcccctgacaaggccatcacccaggaacagtgcgaggcccgcggctgttgctacatccctgcaaagcaggggctgcagggagcccagatggggcagccctggtgcttcttcccacccagctaccccagctacaagctggagaacctgagctcctctgaaatgggctacacggccaccctgacccgtaccacccccaccttcttccccaaggacatcctgaccctgcggctggacgtgatgatggagactgagaaccgcctccacttcacgatcaaagatccagctaacaggcgctacgaggtgcccttggagaccccgcatgtccacagccgggcaccgtccccactctacagcgtggagttctccgaggagcccttcggggtgatcgtgcgccggcagctggacggccgcgtgctgctgaacacgacggtggcgcccctgttctttgcggaccagttccttcagctgtccacctcgctgccctcgcagtatatcacaggcctcgccgagcacctcagtcccctgatgctcagcaccagctggaccaggatcaccctgtggaaccgggaccttgcgcccacgcccggtgcgaacctctacgggtctcaccctttctacctggcgctggaggacggcgggtcggcacacggggtgttcctgctaaacagcaatgccatggatgtggtcctgcagccgagccctgcccttagctggaggtcgacaggtgggatcctggatgtctacatcttcctgggcccagagcccaagagcgtggtgcagcagtacctggacgttgtgggatacccgttcatgccgccatactggggcctgggcttccacctgtgccgctggggctactcctccaccgctatcacccgccaggtggtggagaacatgaccagggcccacttccccctggacgtccagtggaacgacctggactacatggactcccggagggacttcacgttcaacaaggatggcttccgggacttcccggccatggtgcaggagctgcaccagggcggccggcgctacatgatgatcgtggatcctgccatcagcagctcgggccctgccgggagctacaggccctacgacgagggtctgcggaggggggttttcatcaccaacgagaccggccagccgctgattgggaaggtatggcccgggtccactgccttccccgacttcaccaaccccacagccctggcctggtgggaggacatggtggctgagttccatgaccaggtgcccttcgacggcatgtggattgacatgaacgagccttccaacttcatcaggggctctgaggacggctgccccaacaatgagctggagaacccaccctacgtgcctggggtggttggggggaccctccaggcggccaccatctgtgcctccagccaccagtttctctccacacactacaacctgcacaacctctacggcctgaccgaagccatcgcctcccacagggcgctggtgaaggctcgggggacacgcccatttgtgatctcccgctcgacctttgctggccacggccgatacgccggccactggacgggggacgtgtggagctcctgggagcagctcgcctcctccgtgccagaaatcctgcagtttaacctgctgggggtgcctctggtcggggccgacgtctgcggcttcctgggcaacacctcagaggagctgtgtgtgcgctggacccagctgggggccttctaccccttcatgcggaaccacaacagcctgctcagtctgccccaggagccgtacagcttcagcgagccggcccagcaggccatgaggaaggccctcaccctgcgctacgcactcctcccccacctctacacactgttccaccaggcccacgtcgcgggggagaccgtggcccggcccctcttcctggagttccccaaggactctagcacctggactgtggaccaccagctcctgtggggggaggccctgctcatcaccccagtgctccaggccgggaaggccgaagtgactggctacttccccttgggcacatggtacgacctgcagacggtgccagtagaggcccttggcagcctcccacccccacctgcagctccccgtgagccagccatccacagcgaggggcagtgggtgacgctgccggcccccctggacaccatcaacgtccacctccgggctgggtacatcatccccctgcagggccctggcctcacaaccacagagtcccgccagcagcccatggccctggctgtggccctgaccaagggtggggaggcccgaggggagctgttctgggacgatggagagagcctggaagtgctggagcgaggggcctacacacaggtcatcttcctggccaggaataacacgatcgtgaatgagctggtacgtgtgaccagtgagggagctggcctgcagctgcagaaggtgactgtcctgggcgtggccacggcgccccagcaggtcctctccaacggtgtccctgtctccaacttcacctacagccccgacaccaaggtcctggacatctgtgtctcgctgttgatgggagagcagtttctcgtcagctggtgttag

SEQ ID NO: 296 - protein, 883 aa, synthetic construct
  REGION 1..883: note = Synthetic
AHPGRPRAVPTQCDVPPNSRFDCAPDKAITQEQCEARGCCYIPAKQGLQGAQMGQPWCFFPPSYPSYKLENLSSSEMGYTATLTRTTPTFFPKDILTLRLDVMMETENRLHFTIKDPANRRYEVPLETPHVHSRAPSPLYSVEFSEEPFGVIVRRQLDGRVLLNTTVAPLFFADQFLQLSTSLPSQYITGLAEHLSPLMLSTSWTRITLWNRDLAPTPGANLYGSHPFYLALEDGGSAHGVFLLNSNAMDVVLQPSPALSWRSTGGILDVYIFLGPEPKSVVQQYLDVVGYPFMPPYWGLGFHLCRWGYSSTAITRQVVENMTRAHFPLDVQWNDLDYMDSRRDFTFNKDGFRDFPAMVQELHQGGRRYMMIVDPAISSSGPAGSYRPYDEGLRRGVFITNETGQPLIGKVWPGSTAFPDFTNPTALAWWEDMVAEFHDQVPFDGMWIDMNEPSNFIRGSEDGCPNNELENPPYVPGVVGGTLQAATICASSHQFLSTHYNLHNLYGLTEAIASHRALVKARGTRPFVISRSTFAGHGRYAGHWTGDVWSSWEQLASSVPEILQFNLLGVPLVGADVCGFLGNTSEELCVRWTQLGAFYPFMRNHNSLLSLPQEPYSFSEPAQQAMRKALTLRYALLPHLYTLFHQAHVAGETVARPLFLEFPKDSSTWTVDHQLLWGEALLITPVLQAGKAEVTGYFPLGTWYDLQTVPVEALGSLPPPPAAPREPAIHSEGQWVTLPAPLDTINVHLRAGYIIPLQGPGLTTTESRQQPMALAVALTKGGEARGELFWDDGESLEVLERGAYTQVIFLARNNTIVNELVRVTSEGAGLQLQKVTVLGVATAPQQVLSNGVPVSNFTYSPDTKVLDICVSLLMGEQFLVSWC

SEQ ID NO: 297 - DNA, 2649 bp, synthetic construct
  misc_feature 1..2649: note = Synthetic
  source 1..2649: mol_type = other DNA
gcacaccccggccgtcccagagcagtgcccacacagtgcgacgtcccccccaacagccgcttcgattgcgcccctgacaaggccatcacccaggaacagtgcgaggcccgcggctgttgctacatccctgcaaagcaggggctgcagggagcccagatggggcagccctggtgcttcttcccacccagctaccccagctacaagctggagaacctgagctcctctgaaatgggctacacggccaccctgacccgtaccacccccaccttcttccccaaggacatcctgaccctgcggctggacgtgatgatggagactgagaaccgcctccacttcacgatcaaagatccagctaacaggcgctacgaggtgcccttggagaccccgcatgtccacagccgggcaccgtccccactctacagcgtggagttctccgaggagcccttcggggtgatcgtgcgccggcagctggacggccgcgtgctgctgaacacgacggtggcgcccctgttctttgcggaccagttccttcagctgtccacctcgctgccctcgcagtatatcacaggcctcgccgagcacctcagtcccctgatgctcagcaccagctggaccaggatcaccctgtggaaccgggaccttgcgcccacgcccggtgcgaacctctacgggtctcaccctttctacctggcgctggaggacggcgggtcggcacacggggtgttcctgctaaacagcaatgccatggatgtggtcctgcagccgagccctgcccttagctggaggtcgacaggtgggatcctggatgtctacatcttcctgggcccagagcccaagagcgtggtgcagcagtacctggacgttgtgggatacccgttcatgccgccatactggggcctgggcttccacctgtgccgctggggctactcctccaccgctatcacccgccaggtggtggagaacatgaccagggcccacttccccctggacgtccagtggaacgacctggactacatggactcccggagggacttcacgttcaacaaggatggcttccgggacttcccggccatggtgcaggagctgcaccagggcggccggcgctacatgatgatcgtggatcctgccatcagcagctcgggccctgccgggagctacaggccctacgacgagggtctgcggaggggggttttcatcaccaacgagaccggccagccgctgattgggaaggtatggcccgggtccactgccttccccgacttcaccaaccccacagccctggcctggtgggaggacatggtggctgagttccatgaccaggtgcccttcgacggcatgtggattgacatgaacgagccttccaacttcatcaggggctctgaggacggctgccccaacaatgagctggagaacccaccctacgtgcctggggtggttggggggaccctccaggcggccaccatctgtgcctccagccaccagtttctctccacacactacaacctgcacaacctctacggcctgaccgaagccatcgcctcccacagggcgctggtgaaggctcgggggacacgcccatttgtgatctcccgctcgacctttgctggccacggccgatacgccggccactggacgggggacgtgtggagctcctgggagcagctcgcctcctccgtgccagaaatcctgcagtttaacctgctgggggtgcctctggtcggggccgacgtctgcggcttcctgggcaacacctcagaggagctgtgtgtgcgctggacccagctgggggccttctaccccttcatgcggaaccacaacagcctgctcagtctgccccaggagccgtacagcttcagcgagccggcccagcaggccatgaggaaggccctcaccctgcgctacgcactcctcccccacctctacacactgttccaccaggcccacgtcgcgggggagaccgtggcccggcccctcttcctggagttccccaaggactctagcacctggactgtggaccaccagctcctgtggggggaggccctgctcatcaccccagtgctccaggccgggaaggccgaagtgactggctacttccccttgggcacatggtacgacctgcagacggtgccagtagaggcccttggcagcctcccacccccacctgcagctccccgtgagccagccatccacagcgaggggcagtgggtgacgctgccggcccccctggacaccatcaacgtccacctccgggctgggtacatcatccccctgcagggccctggcctcacaaccacagagtcccgccagcagcccatggccctggctgtggccctgaccaagggtggggaggcccgaggggagctgttctgggacgatggagagagcctggaagtgctggagcgaggggcctacacacaggtcatcttcctggccaggaataacacgatcgtgaatgagctggtacgtgtgaccagtgagggagctggcctgcagctgcagaaggtgactgtcctgggcgtggccacggcgccccagcaggtcctctccaacggtgtccctgtctccaacttcacctacagccccgacaccaaggtcctggacatctgtgtctcgctgttgatgggagagcagtttctcgtcagctggtgt

SEQ ID NO: 298 - DNA, 2649 bp, synthetic construct
  misc_feature 1..2649: note = Synthetic
  source 1..2649: mol_type = other DNA
gcacacccaggcagacctagagcagtgcccacacaatgtgatgtcccccccaactcaagatttgattgtgcccctgacaaggccatcacccaagaacagtgtgaggccagaggctgttgctatatccctgcaaagcaggggttacagggagcccagatggggcagccatggtgcttcttcccacccagctacccttcttacaaactggaaaacctgagctcctctgaaatgggctacacagccacactgaccagaaccacccccaccttctttcccaaagatatcctgaccttaagactggatgtgatgatggaaactgaaaatagattacactttacaattaaagatccagctaacaggagatatgaagtgcccttggagaccccacatgttcattcaagagcacctagcccactctactctgtggagttctcagaagagccatttggggtgattgtgagaagacaattggatggaagagtgctgctgaatacaacagtggctccccttttttttgcagaccaatttcttcagctgtctaccagtctgcccagccagtatatcacaggcctggctgaacatctcagtcccttgatgctcagcaccagctggaccaggattaccttatggaatagagaccttgccccaactccaggtgccaacctctatgggtctcaccctttttacctggcccttgaggatggagggtctgcacatggggtgtttcttctaaacagcaatgcaatggatgtggtcctacagccatctcctgcccttagctggagatccacaggtgggatcctagatgtctatattttcctgggaccagagcctaagtcagtggtgcagcagtacctggatgttgtgggatatccattcatgcctccatactggggcctgggcttccatctgtgcagatggggatattcctccacagctatcacaagacaagtggtggagaatatgaccagggcccacttccccctggatgtccagtggaatgaccttgactacatggactccagaagggatttcacatttaacaaggatggcttcagagacttccctgccatggtgcaggaactgcaccaaggaggcagaagatacatgatgatagtggatcctgccatcagtagctctggccctgctgggagctatagaccctatgatgagggtctgagaaggggggttttcatcacaaatgagactggccaacctctgattgggaaggtatggccagggtccactgctttcccagacttcactaacccaacagccctggcctggtgggaggacatggtagctgaattccatgaccaggtgccttttgatggcatgtggattgacatgaatgaaccttccaacttcatcaggggctctgaggatggctgccccaacaatgagctggaaaacccaccttatgttcctggggtggttggtgggaccctccaggcagccaccatatgtgcctccagccaccagtttctctccacacactataacctccacaacctatatggactgacagaagccattgcctcccatagggcactggtgaaggctagaggtacaagaccatttgtgatatctagaagcacttttgctggccatggcagatatgcaggccactggactggagatgtttggagctcttgggagcagctggcctccagtgtgccagaaattctgcagtttaatctactaggggtgcctttggtaggggctgatgtctgtggctttctgggcaacacctcagaagagctttgtgtgagatggacccaactgggggccttctatcccttcatgagaaaccacaatagcctgctcagtttgccccaggagccatacagcttctcagagccagcccagcaggccatgaggaaggcccttactttaagatatgcactcctcccccacttgtacacactgtttcaccaggcccatgttgcaggagaaactgtggccagacccttgttcctggagttccctaaggactcttcaacctggactgtggaccaccaactcctctggggggaggccctcctcatcacaccagttctccaggcagggaaggctgaagttactggctacttccccttgggcacatggtatgaccttcagacagttccagtagaggcacttggcagcctcccacccccacctgcagctcccagagagccagcaattcactctgaagggcaatgggtgactctgccagccccactggacaccattaatgtccatttaagagctggttatatcatacccctgcagggccctggcctcacaaccacagagtccagacagcagcctatggctctggctgtagcattgactaaaggtggggaggcaagaggggagttattctgggatgatggagagtcactggaagtgttggagagaggggcatacacacaggttatcttcttggcaaggaataacacaatagtgaatgagttagtaagagtaaccagtgagggagctggcctgcagttacagaaggtgactgtccttggagtggccactgccccccagcaagtcctatccaatggtgtccctgtatccaacttcacctacagcccagacacaaaggtcctggatatctgtgtctccctgttgatgggagaacagtttctggtcagctggtgt

SEQ ID NO: 299 - DNA, 2649 bp, synthetic construct
  misc_feature 1..2649: note = Synthetic
  source 1..2649: mol_type = other DNA
gcccatcctggcagacctagagctgtgcccacacagtgtgatgtgcctccaaacagcagatttgactgtgcccctgacaaggccatcacacaagagcagtgtgaagccagaggctgctgttacatccctgccaagcaaggactgcaaggggctcagatgggacagccctggtgcttcttcccaccatcttaccccagctacaagctggaaaacctgagcagctctgagatgggctacactgctacactgaccagaaccacacctacattcttcccaaaggacatcctgacactgaggctggatgtgatgatggaaacagagaacaggctgcacttcaccatcaaggaccctgccaatagaagatatgaggtgcccctggaaacccctcatgtgcactctagagccccatctccactgtactctgtggaattttctgaggaaccctttggggtcatagtcagaaggcagctggatggcagagtgctgctgaacacaactgtggcccctctgttctttgctgatcagttcctgcagctgagcaccagcctgcctagccagtatatcacaggcctggcagagcacctgtctccactgatgctgagcacatcctggaccagaatcaccctgtggaacagagacctggctcccacacctggggccaacctgtatggctctcaccccttctatctggccctggaagatggtggttcagcccatggtgtctttctgctgaactccaatgccatggatgtggtgctgcagccctctcctgctctgtcttggagaagcactggtggcatcctggatgtgtacatctttctgggccctgagcctaagtctgtggtgcagcagtacctggatgttgtgggctaccccttcatgcctccttattggggcctgggcttccacctgtgcagatggggatacagcagcacagccatcaccagacaggttgtggaaaacatgaccagagcacacttcccactggatgtgcagtggaatgacctggactacatggacagcagaagggacttcaccttcaacaaggatggcttcagagacttccctgccatggtgcaagagctgcaccaaggtggtagaagatatatgatgattgtggacccagccatcagctcctctggaccagctggcagctacagaccctatgatgagggactgagaagaggggtgttcatcaccaatgagacaggccagcctctgattggcaaagtgtggccaggctccacagcctttccagatttcacaaaccccacagctctggcttggtgggaagatatggtggcagagttccatgatcaggtgccctttgatggcatgtggattgacatgaatgagcccagcaacttcatcaggggctctgaggatggatgccccaacaatgaactggaaaatcctccttatgtgcctggtgttgttggagggacactgcaggcagccacaatttgtgccagctctcaccagtttctgagcacccactacaacctgcacaatctgtatggcctgactgaggccattgccagccacagggctcttgtgaaggctagaggcaccagaccttttgtgatcagcaggtccacctttgctggccatggcagatatgctggccactggactggggatgtgtggtctagttgggagcagctggctagctctgtgcctgagatcctgcagttcaacctgctgggagtgccccttgttggagcagatgtgtgtggcttcctgggcaacacctcagaggaactgtgtgtcagatggactcagctgggagcattctaccctttcatgagaaaccacaacagcctgctgagcctgcctcaagagccttacagcttttctgagccagcacagcaggccatgagaaaggccctgactctgagatatgccctgctgcctcacctgtacaccctgttccatcaggctcatgtggctggggagactgtggctagacccctgttcctggaattccccaaggacagctccacctggacagtggatcatcagctgctgtggggagaagccctgctgattacacctgtgctgcaggctggcaaggctgaagtgacaggctacttccctcttggcacttggtatgacctgcagacagtgcctgtggaagctctgggatctctgcctccacctcctgctgctcctagagagcctgccattcactctgaaggccagtgggttaccctgcctgctccactggataccatcaatgtgcatctgagagcaggctacatcatccctctgcaaggccctggcctgaccaccacagaatctagacagcagccaatggcactggctgtggccctgaccaaaggtggagaagctagaggggagctgttctgggatgatggggagagcctggaagtgctggaaagaggggcctatacacaagtgatttttctggctaggaacaataccattgtgaatgagcttgtcagagtcacctctgaaggtgctggcctgcagctccagaaagtgacagtgcttggagtggccacagcaccccagcaagtgctgtctaatggggtgccagtgtccaacttcacatacagccctgataccaaggtcctggacatctgtgtgtccctgcttatgggagagcagttcctggtgtcttggtgc

SEQ ID NO: 300 - DNA, 2649 bp, synthetic construct
  misc_feature 1..2649: note = Synthetic
  source 1..2649: mol_type = other DNA
gcccaccctggcagacctagagcagtgcccacccagtgtgatgtgcctcctaacagcaggtttgactgtgcacctgacaaggccatcacccaggagcagtgtgaagccaggggttgctgctatatcccagccaaacagggtctgcagggagcccaaatgggccagccttggtgcttctttccaccctcttacccttcttacaagctggaaaacctatcttcaagtgagatgggctacacagccactctaacaagaaccacacctacctttttccccaaggacatcctcactctgagactggatgtaatgatggagactgaaaacagactccacttcaccattaaagacccagccaacagaagatatgaggtaccattggagaccccccatgtccacagcagagcacccagccccctatactcagtggaattctctgaggaaccttttggtgtcatagtgagaagacagctggatggcagagtgctcctcaacacaactgtggctccactgttttttgctgaccaattcctacagctgagcaccagcctgccctcccaatatatcacagggctggctgaacacctatcccctctgatgctgtccacctcctggaccaggatcactctgtggaacagggacttagcccctacccctggtgccaacctgtatggctctcacccattctacctggccctggaggatggaggttcagcccatggagtctttctcctgaactctaatgccatggatgtggtgctacagccatcccctgcattatcttggaggagcacaggaggaatcctggatgtatacatctttctgggcccagaaccaaagtcagttgtacagcagtaccttgatgtggtaggctaccccttcatgcctccatactggggtctgggcttccacctctgcagatggggctacagcagtacagctatcacaagacaggttgtggagaacatgacaagggctcacttccccctggatgtacagtggaatgacttggactacatggacagtagaagggacttcacattcaacaaggatggcttcagggacttccctgccatggtacaggaactccaccagggagggagaagatacatgatgattgtggacccagctatcagttctagtggtcctgcaggttcctacaggccctatgatgaaggcctcagaagaggagtgttcatcactaatgagacaggacagcctttgataggaaaggtctggcctggcagtacagctttcccagattttaccaatccaactgctttggcttggtgggaggacatggtggcagagttccatgaccaggtgccctttgatggcatgtggattgacatgaatgaaccatctaacttcatcagaggatcagaagatggatgccccaacaatgagctggagaaccctccttatgtgccaggtgtggtgggtggcaccctacaggctgcaaccatctgtgccagctcacaccagttcctgagtacacactacaatctacacaacctgtatggcctgactgaagctattgcctcacatagagcactagtcaaggccagagggaccaggccttttgttattagcagaagtacctttgctgggcatggcagatatgctgggcactggacaggtgatgtatggagcagctgggaacagttggcttcatctgttccagagatcctgcagttcaacctgttgggggtgcctttagtgggggcagatgtctgtggtttcttggggaacacctcagaggaactttgtgtcagatggacccaactgggggccttttacccctttatgagaaaccacaactctctgctcagcttgcctcaggaaccctattccttcagtgagcctgcccaacaggccatgaggaaggccctaaccctcagatatgcactgctgcctcacctgtacaccctttttcaccaggcccatgtggcaggtgagacagtagcaagacctctcttcttggagttccctaaagactcaagcacctggactgtggatcaccaactcctgtggggagaggctctgctgatcacacctgtactacaagctggtaaggctgaggtgacaggttacttccccctgggcacctggtatgatctgcagacagtccctgtagaggcactaggctctctgcctccccctcctgcagcccctagagagcctgctatccacagtgagggccaatgggtcaccctacctgctccactagacacaataaatgtgcacctgagagctggctatatcatccccctccagggaccaggtctgacaaccacagaatctagacaacagcccatggcactagcagttgccctgaccaagggaggtgaagccaggggtgagcttttctgggatgatggggagtccttggaggttctagaaagaggagcctacactcaggtcatcttcctggccagaaataacaccatagtgaatgagttggtgagagtgacctcagagggagctgggctccaactgcaaaaagtgacagtcttgggagtggccacagcaccacagcaggtcctcagcaatggggtgcctgtgagcaacttcacctactctccagacaccaaagtactggacatctgtgtgagcctgctgatgggtgagcaattcctggtgagctggtgc

SEQ ID NO: 301 - DNA, 2649 bp, synthetic construct
  misc_feature 1..2649: note = Synthetic
  source 1..2649: mol_type = other DNA
gcccaccctggcagacctagagcagtgcccacccagtgtgatgtgcctcctaacagcaggtttgactgtgcacctgacaaggccatcacccaggagcagtgtgaagccaggggttgctgctatatcccagccaaacagggtctgcagggagcccaaatgggccagccttggtgcttctttccaccctcttacccttcttacaagctggaaaacctatcttcaagtgagatgggctacacagccactctaacaagaaccacacctacctttttccccaaggacatcctcactctgagactggatgtaatgatggagactgaaaacagactccacttcaccattaaagacccagccaacagaagatatgaggtaccattggagaccccccatgtccacagcagagcacccagccccctatactcagtggaattctctgaggaaccttttggtgtcatagtgagaagacagctggatggcagagtgctcctcaacacaactgtggctccactgttttttgctgaccaattcctacagctgagcaccagcctgccctcccaatatatcacagggctggctgaacacctatcccctctgatgctgtccacctcctggaccaggatcactctgtggaacagggacttagcccctacccctggtgccaacctgtatggctctcacccattctacctggccctggaggatggaggttcagcccatggagtctttctcctgaactctaatgccatggatgtggtgctacagccatcccctgcattatcttggaggagcacaggaggaatcctggatgtatacatctttctgggcccagaaccaaagtcagttgtacagcagtaccttgatgtggtaggctaccccttcatgcctccatactggggtctgggcttccacctctgcagatggggctacagcagtacagctatcacaagacaggttgtggagaacatgacaagggctcacttccccctggatgtacagtggaatgacttggactacatggacagtagaagggacttcacattcaacaaggatggcttcagggacttccctgccatggtacaggaactccaccagggagggagaagatacatgatgattgtggacccagctatcagttctagtggtcctgcaggttcctacaggccctatgatgaaggcctcagaagaggagtgttcatcactaatgagacaggacagcctttgataggaaaggtctggcctggcagtacagctttcccagattttaccaatccaactgctttggcttggtgggaggacatggtggcagagttccatgaccaggtgccctttgatggcatgtggattgacatgaatgaaccatctaacttcatcagaggatcagaagatggatgccccaacaatgagctggagaaccctccttatgtgccaggtgtggtgggtggcaccctacaggctgcaaccatctgtgccagctcacaccagttcctgagtacacactacaatctacacaacctgtatggcctgactgaagctattgcctcacatagagcactagtcaaggccagagggaccaggccttttgttattagcagaagtacctttgctgggcatggcagatatgctgggcactggacaggtgatgtatggagcagctgggaacagttggcttcatctgttccagagatcctgcagttcaacctgttgggggtgcctttagtgggggcagatgtctgtggtttcttggggaacacctcagaggaactttgtgtcagatggacccaactgggggccttttacccctttatgagaaaccacaactctctgctcagcttgcctcaggaaccctattccttcagtgagcctgcccaacaggccatgaggaaggccctaaccctcagatatgcactgctgcctcacctgtacaccctttttcaccaggcccatgtggcaggtgagacagtagcaagacctctcttcttggagttccctaaagactcaagcacctggactgtggatcaccaactcctgtggggagaggctctgctgatcacacctgtactacaagctggtaaggctgaggtgacaggttacttccccctgggcacctggtatgatctgcagacagtccctgtagaggcactaggctctctgcctccccctcctgcagcccctagagagcctgctatccacagtgagggccaatgggtcaccctacctgctccactagacaccatcaatgtgcacctgagagctggctatatcatccccctccaaggaccaggtctgacaaccacagaatctagacaacagcccatggcactagcagttgccctgaccaagggaggtgaagccaggggtgagcttttctgggatgatggggagtccttggaggttctagaaagaggagcctacactcaggtcatcttcctggccagaaataacaccatagtgaatgagttggtgagagtgacctcagagggagctgggctccaactgcaaaaagtgacagtcttgggagtggccacagcaccacagcaggtcctcagcaatggggtgcctgtgagcaacttcacctactctccagacaccaaagtactggacatctgtgtgagcctgctgatgggtgagcaattcctggtgagctggtgc

SEQ ID NO: 302 - DNA, 2649 bp, synthetic construct
  misc_feature 1..2649: note = Synthetic
  source 1..2649: mol_type = other DNA
gcccaccctggcagacccagagcagtccccacccagtgtgatgtacctcccaacagcagatttgactgtgcccctgacaaggccatcacccaggaacagtgtgaggccagggggtgctgctatattcctgccaagcagggcctgcagggtgcccaaatgggccagccttggtgcttcttccctcccagctacccctcttacaagttagaaaacctgtctagctctgaaatgggctacacagccaccctgaccagaacaacccctactttcttcccaaaggacattttaaccctgaggctggatgtgatgatggagactgagaatagactgcacttcaccatcaaggacccagccaacagaaggtatgaagtgcctctggagaccccccatgtgcactctagggcacctagccctctatactcagtggagttctctgaagaaccttttggggtcatagtgaggaggcaactggatggcagagtgcttctgaacaccacagtggcccccctgttctttgctgaccaattcctgcagctgagtaccagcctgccttcacagtacatcacaggcctggctgaacacctgagccctctgatgttgagcaccagctggaccagaatcaccttatggaacagagacttagccccaacccctggagccaacctctatggaagccaccctttctacctggccctggaggatggaggctctgcccatggtgttttcctcctgaactccaatgccatggatgttgtgctgcaaccttcccctgctctgagctggagatcaacagggggtatcttagatgtgtacatcttcctgggccctgaaccaaagtctgtggtacagcagtacctggatgtagtgggctaccccttcatgcccccctactggggcctaggcttccacctgtgcaggtgggggtactctagcactgccatcaccagacaggtggtggagaacatgactagagcccactttccattggatgtgcaatggaatgaccttgactacatggactcaaggagggacttcacattcaacaaggatggcttcagagactttcctgccatggtgcaggagctgcaccaagggggcagaagatacatgatgattgtggacccagccatctcctcttcaggacctgctggttcttatagaccttatgatgagggccttagaagaggtgtgttcattaccaatgaaactggacagcctctgattggcaaggtgtggccaggctccactgccttccctgactttacaaaccctacagccctggcctggtgggaggatatggtagctgagttccatgaccaggtgccttttgatggcatgtggatagacatgaatgaaccaagtaacttcatcagaggtagtgaggatggctgtcccaacaatgagctggagaaccccccatatgttcctggagtggtgggtggtactctccaggctgctaccatttgtgcctcaagtcaccagttcctgagcacccactacaacctgcacaacctgtatggcctgactgaggctattgctagccacagggctctggtgaaggccaggggaacaagaccttttgtgatttctaggtcaacatttgcaggccatggaagatatgctggtcactggacaggtgatgtgtggtcttcctgggaacagctggccagttcagtgccagagatcctgcagttcaacctcctaggagtgccactggtgggggcagatgtttgtggctttctggggaacacctctgaagagctgtgtgtgagatggacccagctgggagccttctacccattcatgaggaaccacaacagtttgctttccctacctcaggagccctacagcttctctgagccagcccaacaggccatgagaaaggccttgacacttagatatgccctactgccccacttgtataccttattccaccaggctcatgtggctggtgagactgtggccaggcccctgttcctggagttccccaaggacagctccacctggacagtagaccatcagctcctgtggggagaggccctgcttatcacccctgtgctccaagctggcaaagcagaggtgacaggttacttccctctgggcacctggtatgatctccagacagtgcctgtggaagcattaggttctttgcctcctccacctgcagcccccagagagcctgccatccactctgaaggccagtgggtcaccctgcctgcccccctggacacaatcaatgtccacctgagagctggttacataatccctctgcaagggcctggcttgaccaccacagaaagcagacagcagcctatggccctggctgtagctctgactaagggaggtgaggcaagaggggagctgttctgggatgatggagagagcctggaagtgctagagagaggagcctacacccaagtcatcttcttggccaggaacaataccatagtgaatgagctggtgagggtgacctctgaaggggctggccttcaactccagaaggtgactgttctgggagtggccacagccccacagcaggtgctgtccaatggtgtgcctgtcagcaacttcacatacagcccagatactaaggtgctggatatctgtgttagccttctcatgggtgaacagttcttagtgtcatggtgc

SEQ ID NO: 303 - DNA, 2649 bp, synthetic construct
  misc_feature 1..2649: note = Synthetic
  source 1..2649: mol_type = other DNA
gcccaccctggcagacctagagctgtgcctacccagtgtgatgtgccacctaactccagatttgactgtgcccctgacaaggccatcacccaagagcagtgcgaggccaggggatgctgctacatccctgccaaacagggcctgcagggagcccagatgggccaaccctggtgctttttccctccctcttacccctcctacaagctggagaacctgagctcctcagagatgggctacacagctaccctgaccagaaccacccccaccttctttcctaaggacatcctgaccctgagactggatgtgatgatggaaacagagaaccggctgcacttcacaatcaaggacccagccaacagaagatatgaagttcccctggagacccctcatgtgcactccagggcccccagccccctatacagcgtggagttctctgaggagccttttggcgtcattgtgagaagacaactggatggcagagtgctgttgaacaccacagtggcccctctcttctttgctgaccaattcctgcagctgagcaccagtctgcccagccagtacatcactggcctggctgagcacctgtctcccttaatgctgtccaccagctggacaaggatcaccctgtggaaccgggacttggcccccacgcctggagccaacctatacggctcccaccccttctacctggccctggaggacggaggctcagcccatggagttttcctgctgaactctaacgccatggatgtggtgctgcaacctagccctgccctgagctggagaagcactggcggaattctcgatgtctacatcttcctgggacctgaaccaaagtcagtggtgcagcagtacctggatgtggtgggctaccccttcatgccaccttactggggcctgggatttcacctgtgcagatggggctactccagcacagccatcaccagacaggtggtggagaacatgacccgggcccacttccccctggatgtccagtggaatgacttagactacatggatagcagaagagacttcaccttcaacaaggatggctttagagacttccctgccatggtgcaggaactgcaccagggtggcagaagatacatgatgattgtggaccctgccatttctagctctggcccagcaggctcctacaggccctatgatgagggactgcggagaggggtcttcatcaccaatgagacaggccagccactgatcggcaaggtgtggcctggatccacagccttcccagacttcaccaaccctacagcccttgcctggtgggaagacatggtggccgaattccacgaccaggtgccctttgatggcatgtggatcgacatgaatgagcctagcaatttcatcagaggaagtgaggatggctgccccaacaatgaattagaaaacccgccctatgtgcctggcgttgtgggaggcaccctccaggctgccaccatctgtgccagcagccaccagttcttatccacacactacaacctgcacaacctgtatggcctgaccgaagccattgccagccacagagcgctggtgaaagccaggggcacccggccttttgtgatcagcagaagcaccttcgctggccatggcaggtatgccggacattggacaggagatgtatggagctcttgggagcagttggccagctctgtgcctgagatcctgcagttcaacctactgggggtccctctggtgggagcagatgtctgcggcttcctaggcaacacctcagaggaactgtgcgtaagatggacccagctgggggccttctaccctttcatgaggaaccacaactctctgctgagcctgcctcaggagccatacagcttctctgagccagcccagcaggccatgagaaaggccctgaccctgagatatgccttactgccccacctgtacacactgttccaccaggcccatgtggctggggagacagtggcacggcccctgttcttggagttccccaaggactccagcacctggacagtggaccaccagctgctctggggagaggccctgctcatcaccccagtgctgcaggctggcaaggctgaagtcacaggctacttccccctgggcacctggtatgacctccaaactgtgccagtggaggccctgggcagcctgcctcctccccctgctgctcctagagagcctgccatccactcggagggccagtgggtgacactgcctgcccccctagacaccatcaatgttcacctgagagcaggctacatcatcccactgcaaggccctggcctgaccaccactgagagcagacagcagcccatggccctggcagttgccctgaccaagggcggcgaagccagaggagaactgttctgggatgatggcgaatctttggaagtgctggagagaggggcctacacccaggtgatcttcctggcccggaacaacactatagtgaatgaactggtgcgggtgacatcagagggtgcaggcctgcagctgcaaaaagtgacagtgctgggtgtggcaacagcccctcagcaggtactatccaatggagtgccagtgagcaacttcacctacagcccagacactaaggtgctagacatctgtgtttctctgctgatgggagagcaattcctggtgagctggtgc

SEQ ID NO: 304 - DNA, 2649 bp, synthetic construct
  misc_feature 1..2649: note = Synthetic
  source 1..2649: mol_type = other DNA
gcccaccctggcagacctagagctgtgcctacccagtgtgatgtgccacctaactccagatttgactgtgcccctgacaaggccatcacccaagagcagtgcgaggccaggggatgctgctacatccctgccaaacagggcctgcagggagcccagatgggccaaccctggtgctttttccctccctcttacccctcctacaagctggagaacctgagctcctcagagatgggctacacagctaccctgaccagaaccacccccaccttctttcctaaggacatcctgaccctgagactggatgtgatgatggaaacagagaaccggctgcacttcacaatcaaggacccagccaacagaagatatgaagttcccctggagacccctcatgtgcactccagggcccccagccccctatacagcgtggagttctctgaggagccttttggcgtcattgtgagaagacaactggatggcagagtgctgttgaacaccacagtggcccctctcttctttgctgaccaattcctgcagctgagcaccagtctgcccagccagtacatcactggcctggctgagcacctgtctcccttaatgctgtccaccagctggacaaggatcaccctgtggaaccgggacttggcccccacgcctggagccaacctatacggctcccaccccttctacctggccctggaggacggaggctcagcccatggagttttcctgctgaactctaacgccatggatgtggtgctgcaacctagccctgccctgagctggagaagcactggcggaattctcgatgtctacatcttcctgggacctgaaccaaagtcagtggtgcagcagtacctggatgtggtgggctaccccttcatgccaccttactggggcctgggatttcacctgtgcagatggggctactccagcacagccatcaccagacaggtggtggagaacatgacccgggcccacttccccctggatgtccagtggaatgacttagactacatggatagcagaagagacttcaccttcaacaaggatggctttagagacttccctgccatggtgcaggaactgcaccagggtggcagaagatacatgatgatcgttgaccctgccatttctagctctggcccagcaggctcctacaggccctatgatgagggactgcggagaggggtcttcatcaccaatgagacaggccagccactgatcggcaaggtgtggcctggatccacagccttcccagacttcaccaaccctacagcccttgcctggtgggaagacatggtggccgaattccacgaccaggtgccctttgatggcatgtggatcgacatgaatgagcctagcaatttcatcagaggaagtgaggatggctgccccaacaatgaattagaaaacccgccctatgtgcctggcgttgtgggaggcaccctccaggctgccaccatctgtgccagcagccaccagttcttatccacacactacaacctgcacaacctgtatggcctgaccgaagccattgccagccacagagcgctggtgaaagccaggggcacccggccttttgtgatcagcagaagcaccttcgctggccatggcaggtatgccggacattggacaggagacgtctggagctcttgggagcagttggccagctctgtgcctgagatcctgcagttcaacctactgggggtccctctggtgggagcagatgtctgcggcttcctaggcaacacctcagaggaactgtgcgtaagatggacccagctgggggccttctaccctttcatgaggaaccacaactctctgctgagcctgcctcaggagccatacagcttctctgagccagcccagcaggccatgagaaaggccctgaccctgagatatgccttactgccccacctgtacacactgttccaccaggcccacgtcgctggggagacagtggcacggcccctgttcttggagttccccaaggactccagcacctggacagtggaccaccagctgctctggggagaggccctgctcatcaccccagtgctgcaggctggcaaggctgaagtcacaggctacttccccctgggcacctggtatgacctccaaactgtgccagtggaggccctgggcagcctgcctcctccccctgctgctcctagagagcctgccatccactcggagggccagtgggtgacactgcctgcccccctagacaccatcaatgttcacctgagagcaggctacatcatcccactgcaaggccctggcctgaccaccactgagagcagacagcagcccatggccctggccgttgccctgaccaagggcggcgaagccagaggagaactgttctgggatgatggcgaatctttggaagtgctggagagaggggcctacacccaggtgatcttcctggcccggaacaacactatcgttaatgaactggtgcgggtgacatcagagggtgcaggcctgcagctgcaaaaagtgacagtgctgggtgtggcaacagcccctcagcaggtactatccaatggagtgccagtgagcaacttcacctacagcccagacactaaggtgctagacatctgtgtttctctgctgatgggagagcaattcctggtgagctggtgc

SEQ ID NO: 305 - DNA, 2649 bp, synthetic construct
  misc_feature 1..2649: note = Synthetic
  source 1..2649: mol_type = other DNA
gctcatcctggaagacctagagctgtgcctacacagtgtgatgtgcctcctaattctagatttgattgtgctcctgataaggctatcacacaggaacagtgtgaagctagaggatgttgttatatccctgctaagcagggactgcagggagctcagatgggacagccttggtgtttttttcctccttcttatccttcttataagctggaaaatctgtcttcttctgaaatgggatatacagctacactgacaagaacaacacctacattttttcctaaggatatcctgacactgagactggatgtgatgatggaaacagaaaatagactgcattttacaatcaaggatcctgctaatagaagatatgaagtgcctctggaaacacctcatgtgcattctagagctccttctcctctgtattctgtggaattttctgaagaaccttttggagtgatcgtgagaagacagctggatggaagagtgctgctgaatacaacagtggctcctctgttttttgctgatcagtttctgcagctgtctacatctctgccttctcagtatatcacaggactggctgaacatctgtctcctctgatgctgtctacatcttggacaagaatcacactgtggaatagagatctggctcctacacctggagctaatctgtatggatctcatcctttttatctggctctggaagatggaggatctgctcatggagtgtttctgctgaattctaatgctatggatgtggtgctgcagccttctcctgctctgtcttggagatctacaggaggaatcctggatgtgtatatctttctgggacctgaacctaagtctgtggtgcagcagtatctggatgtggtgggatatccttttatgcctccttattggggactgggatttcatctgtgtagatggggatattcttctacagctatcacaagacaggtggtggaaaatatgacaagagctcattttcctctggatgtgcagtggaatgatctggattatatggattctagaagagattttacatttaataaggatggatttagagattttcctgctatggtgcaggaactgcatcagggaggaagaagatatatgatgatcgtggatcctgctatctcttcttctggacctgctggatcttatagaccttatgatgaaggactgagaagaggagtgtttatcacaaatgaaacaggacagcctctgatcggaaaggtgtggcctggatctacagcttttcctgattttacaaatcctacagctctggcttggtgggaagatatggtggctgaatttcatgatcaggtgccttttgatggaatgtggatcgatatgaatgaaccttctaattttatcagaggatctgaagatggatgtcctaataatgaactggaaaatcctccttatgtgcctggagtggtgggaggaacactgcaggctgctacaatctgtgcttcttctcatcagtttctgtctacacattataatctgcataatctgtatggactgacagaagctatcgcttctcatagagctctggtgaaggctagaggaacaagaccttttgtgatctctagatctacatttgctggacatggaagatatgctggacattggacaggagatgtgtggtcttcttgggaacagctggcttcttctgtgcctgaaatcctgcagtttaatctgctgggagtgcctctggtgggagctgatgtgtgtggatttctgggaaatacatctgaagaactgtgtgtgagatggacacagctgggagctttttatccttttatgagaaatcataattctctgctgtctctgcctcaggaaccttattctttttctgaacctgctcagcaggctatgagaaaggctctgacactgagatatgctctgctgcctcatctgtatacactgtttcatcaggctcatgtggctggagaaacagtggctagacctctgtttctggaatttcctaaggattcttctacatggacagtggatcatcagctgctgtggggagaagctctgctgatcacacctgtgctgcaggctggaaaggctgaagtgacaggatattttcctctgggaacatggtatgatctgcagacagtgcctgtggaagctctgggatctctgcctcctcctcctgctgctcctagagaacctgctatccattctgaaggacagtgggtgacactgcctgctcctctggatacaatcaatgtgcatctgagagctggatatatcatccctctgcagggacctggactgacaacaacagaatctagacagcagcctatggctctggctgtggctctgacaaagggaggagaagctagaggagaactgttttgggatgatggagaatctctggaagtgctggaaagaggagcttatacacaggtgatctttctggctagaaataatacaatcgtgaatgaactggtgagagtgacatctgaaggagctggactgcagctgcagaaggtgacagtgctgggagtggctacagctcctcagcaggtgctgtctaatggagtgcctgtgtctaattttacatattctcctgatacaaaggtgctggatatctgtgtgtctctgctgatgggagaacagtttctggtgtcttggtgt

SEQ ID NO: 306 - protein, 240 aa, synthetic construct
  REGION 1..240: note = Synthetic
QVQLQESGPKVVKPSETLSLTCTVSGGSISSYYWNWIRQSPGKGLEWIGYTKRGYTDYNPSLRSRVTISEDTSKNQFSLRISSVTAADTAVYYCAQMGWGSHAFDMWGQGTMVAVSSGGSGGGGSGGGGSGGEIVLTQSPGTLSLSPGERATLSCRASQSVSSSYLAWYQQKPGQAPRLLIYGASSRATGIPDRFSGSGSGTDFTLTISRLEPEDFAVYYCQQYGSSPWTFGQGTKVEIK

SEQ ID NO: 307 - DNA, 720 bp, synthetic construct
  misc_feature 1..720: note = Synthetic
  source 1..720: mol_type = other DNA
caggtgcaactacaggagtcgggcccaaaggtggtgaagccttcggagaccctgtccctcacctgcactgtctctggtggctccatcagtagttactactggaattggatccgccagtccccagggaagggactggagtggattggatataccaaaagagggtataccgactacaacccctccctcaggagtcgcgtcactatatcagaagacacgtccaagaaccagttctccctgaggatcagctctgtgaccgccgcagacacggccgtatattactgtgcacaaatggggtggggatcccatgcttttgacatgtggggccaagggacaatggtcgccgtctcttcaggaggaagtggtggaggcgggtcaggaggtggcgggagcggcggtgaaatagttttgacacagagtcccggcacactgtcactctctcccggggaaagagccaccttgtcatgtagagcaagtcagtcagtctctagctcttatctcgcctggtaccagcagaagccgggacaggcccctagactgctgatctacggggcaagttccagggccaccggaatccccgaccggttcagtggaagcggaagcggaaccgattttactttgacgatttctagactggagccagaggatttcgccgtttactattgtcaacagtacggaagcagcccgtggacgtttggccagggcacgaaggtagaaatcaag

SEQ ID NO: 308 - DNA, 720 bp, synthetic construct
  misc_feature 1..720: note = Synthetic
  source 1..720: mol_type = other DNA
caggtgcaactacaggagtctggcccaaaagtggtgaaaccttctgagacccttagtctcacctgcactgtctctggtggctccataagtagttattattggaattggatcagacagtccccagggaagggactggagtggattggatataccaaaagaggctatacagattacaatccctccctcaggagtagagtcactatatcagaagacacatccaaaaatcagttcagtctgaggatcagctctgtgacagctgcagacacagcagtatattactgtgcacaaatgggttggggatcccatgcttttgatatgtggggccaagggacaatggttgcagtatcttcaggaggaagtggtggaggagggtcaggaggtggaggatctggtggtgaaatagttttgacacagagtccaggcacactgtcactctctccaggggaaagagccaccttgtcatgtagagcaagtcagtcagtctctagctcttatctggcctggtaccagcagaagccaggacaggctcctagactcctgatttatggggcaagttccagggctacaggaatcccagatagatttagtggatctggatctggaactgattttactttgacaatttctagactggagccagaggattttgctgtttattattgtcaacagtatggatctagcccatggacatttggacagggcactaaagtagaaataaag

SEQ ID NO: 309 - DNA, 720 bp, synthetic construct
  misc_feature 1..720: note = Synthetic
  source 1..720: mol_type = other DNA
caggtccagctgcaagagtctggccccaaggtggtcaagccctctgagacactgagcctgacctgcacagtgtctggtggcagcatcagcagctactactggaactggatcagacagagccctggcaaaggcctggaatggattggctacaccaagagaggctacacagactacaaccccagcctgagaagcagagtgaccatctctgaggacaccagcaagaaccagttcagcctgaggatcagctctgtgacagctgctgacacagcagtgtactactgtgcccagatgggctggggcagccatgcctttgatatgtggggccagggcacaatggtggctgtgtccagtgggggctcaggaggaggtggctcaggaggtggaggttcaggaggggagattgtgctgacccagtctcctggcacactgtctctgagccctggggaaagagccacactgagctgtagagccagccagtctgtgtcctctagctacctggcctggtatcagcagaagcctggacaggctcccagactgctgatctatggggcctcttctagagccacaggcatccctgacagattcagtggcagtggctctggcacagacttcaccctgaccatcagcagactggaacctgaggactttgctgtgtactattgccagcagtatggcagcagcccctggacatttggacagggcaccaaggtggaaatcaaa

SEQ ID NO: 310 - DNA, 720 bp, synthetic construct
  misc_feature 1..720: note = Synthetic
  source 1..720: mol_type = other DNA
caagtgcagctgcaggagtctggccctaaggtggtgaaaccatctgagacattgtccctgacttgcactgtatcaggagggtccattagtagttactactggaattggatcagacagagcccagggaagggactagagtggattggctacactaagagagggtacactgactacaaccccagcctcaggtctagagtgactatctctgaggacacctctaagaatcagttctccctgagaataagttctgtgacagcagctgacacagctgtgtactactgtgcccagatgggctggggcagtcatgcctttgacatgtggggccagggaacaatggtagctgtgagctctggaggatcaggggggggaggctctgggggggggggcagtgggggagagattgtcctaacccagtctcctggcaccctttccctttcccctggagagagagccactcttagctgcagagccagccagtctgtctccagctcttacctagcatggtaccaacaaaaacctggacaggctcctagacttcttatctatggagctagtagcagggccacaggcatcccagacaggttttcaggttctggctctggcacagacttcaccctgaccatatccagactggagccagaagattttgcagtctactactgccaacagtatggaagcagcccttggacatttggacaaggcaccaaggttgaaatcaaa

SEQ ID NO: 311 - DNA, 720 bp, synthetic construct
  misc_feature 1..720: note = Synthetic
  source 1..720: mol_type = other DNA
caagtgcagctgcaggagtctggccctaaggtggtgaaaccatctgagacattgtccctgacttgcactgtatcaggagggtccattagtagttactactggaattggatcagacagagcccagggaagggactagagtggattggctacactaagagagggtacactgactacaaccccagcctcaggtctagagtgactatctctgaggacacctctaagaatcagttctccctgagaataagttctgtgacagcagctgacacagctgtgtactactgtgcccagatgggctggggcagtcatgcctttgacatgtggggccagggaacaatggtagctgtgagctctggaggatcaggggggggaggctctggaggaggtggcagtgggggagagattgtcctaacccagtctcctggcaccctttccctttcccctggagagagagccactcttagctgcagagccagccagtctgtctccagctcttacctagcatggtaccaacaaaaacctggacaggctcctagacttcttatctatggagctagtagcagggccacaggcatcccagacaggttttcaggttctggctctggcacagacttcaccctgaccatatccagactggagccagaagattttgcagtctactactgccaacagtatggaagcagcccttggacatttggacaaggcaccaaggttgaaatcaaa

SEQ ID NO: 312 - DNA, 720 bp, synthetic construct
  misc_feature 1..720: note = Synthetic
  source 1..720: mol_type = other DNA
caggtacagctgcaggagtctgggcccaaagtagtgaaaccctctgaaaccctatcactgacctgcacagtttcaggtggaagcattagcagttactactggaactggatcagacagagtccaggcaagggtctggaatggataggctacaccaagagaggttacactgactacaacccatcccttcggtccagagtgaccatttcagaggacacatctaaaaaccagttctccctgagaatcagttctgtgactgctgctgacacagctgtgtactactgtgctcagatgggctggggctcccatgcctttgacatgtggggccagggcaccatggttgcagtgagctctggtggctctggaggaggtggatctggagggggaggctcaggaggtgagattgtgctgacccaaagtcctggcacattgagcctgagccctggagaaagggccactctctcttgcagggccagccagtctgtgtccagttcctacctggcttggtaccaacagaagcctggccaggcccctaggttgctgatctatggagccagctccagagccacagggatccctgacagattctcaggctctggctctggcacagacttcaccctgaccatcagcagactagagcctgaagactttgctgtgtactactgccagcagtatggaagcagcccttggacttttgggcagggcacaaaggttgagatcaaa

SEQ ID NO: 313 - DNA, 720 bp, synthetic construct
  misc_feature 1..720: note = Synthetic
  source 1..720: mol_type = other DNA
caggtgcagctgcaggagtctggccctaaggttgtgaaaccttctgagaccctgagcctgacttgcacagtgtcagggggctctatcagctcatactactggaactggatcagacaaagccctggcaagggcctggaatggattggctacactaagagaggctacacagactacaaccctagcctcaggagccgagtgaccatctcagaggacacatccaagaaccaattctcactgcggattagctctgtgacagctgctgacacagctgtgtactactgtgcccagatgggctggggcagccatgcctttgacatgtggggccagggcaccatggtggctgtgagctctgggggctcaggaggaggtggctcaggcggtggcggctccgggggggaaattgtcctcacccagagccctggcaccctgagcctgagccctggcgaaagagccacactgagctgcagggccagccagtcagtgtccagcagctacctggcttggtaccagcagaagcctggccaggcgccccggctgctgatttatggtgcctcatcccgggccacaggaatccctgacagatttagtggcagtggcagcgggactgactttacactgaccatcagcagactggaacctgaggattttgcagtgtactactgccagcagtatggcagcagcccttggacctttggccagggcaccaaggtggaaatcaag

SEQ ID NO: 314 - DNA, 720 bp, synthetic construct
  misc_feature 1..720: note = Synthetic
  source 1..720: mol_type = other DNA
caggtgcagctgcaggagtctggccctaaggttgtgaaaccttctgagaccctgagcctgacttgcacagtgtcagggggctctatcagctcatactactggaactggatcagacaaagccctggcaagggcctggaatggattggctacactaagagaggctacacagactacaaccctagcctcaggagccgagtgaccatctcagaggacacatccaagaaccaattctcactgcggattagctctgtgacagctgctgacacagctgtgtactactgtgcccagatgggctggggcagccatgcctttgacatgtggggccagggcaccatggtggctgtgagctctgggggctcaggaggaggtggctcaggcggtggcggctccgggggggaaatcgtgctcacccagagccctggcaccctgagcctgagccctggcgaaagagccacactgagctgcagggccagccagtcagtgtccagcagctacctggcttggtaccagcagaagcctggccaggcgccccggctgctgatttatggtgcctcatcccgggccacaggaatccctgacagatttagtggcagtggcagcgggactgactttacactgaccatcagcagactggaacctgaggattttgcagtgtactactgccagcagtatggcagcagcccttggacctttggccagggcaccaaggtggaaatcaag

SEQ ID NO: 315 - DNA, 720 bp, synthetic construct
  misc_feature 1..720: note = Synthetic
  source 1..720: mol_type = other DNA
caggtgcagctgcaggaatctggacctaaggtggtgaagccttctgaaacactgtctctgacatgtacagtgtctggaggatctatctcttcttattattggaattggatcagacagtctcctggaaagggactggaatggatcggatatacaaagagaggatatacagattataatccttctctgagatctagagtgacaatctctgaagatacatctaagaatcagttttctctgagaatctcttctgtgacagctgctgatacagctgtgtattattgtgctcagatgggatggggatctcatgcttttgatatgtggggacagggaacaatggtggctgtgtcttctggaggatctggaggaggaggatctggaggaggaggatctggaggagaaatcgtgctgacacagtctcctggaacactgtctctgtctcctggagaaagagctacactgtcttgtagagcttctcagtctgtgtcttcttcttatctggcttggtatcagcagaagcctggacaggctcctagactgctgatctatggagcttcttctagagctacaggaatccctgatagattttctggatctggatctggaacagattttacactgacaatctctagactggaacctgaagattttgctgtgtattattgtcagcagtatggatcttctccttggacatttggacagggaacaaaggtggaaatcaag

SEQ ID NO: 316 - protein, 1128 aa, synthetic construct
  REGION 1..1128: note = Synthetic
  REGION 1..240: note = MISC_FEATURE - 12450 anti-CD63 scFv
  REGION 241..245: note = MISC_FEATURE - G4S linker
  REGION 246..1128: note = MISC_FEATURE - GAA (70-952)
QVQLQESGPKVVKPSETLSLTCTVSGGSISSYYWNWIRQSPGKGLEWIGYTKRGYTDYNPSLRSRVTISEDTSKNQFSLRISSVTAADTAVYYCAQMGWGSHAFDMWGQGTMVAVSSGGSGGGGSGGGGSGGEIVLTQSPGTLSLSPGERATLSCRASQSVSSSYLAWYQQKPGQAPRLLIYGASSRATGIPDRFSGSGSGTDFTLTISRLEPEDFAVYYCQQYGSSPWTFGQGTKVEIKGGGGSAHPGRPRAVPTQCDVPPNSRFDCAPDKAITQEQCEARGCCYIPAKQGLQGAQMGQPWCFFPPSYPSYKLENLSSSEMGYTATLTRTTPTFFPKDILTLRLDVMMETENRLHFTIKDPANRRYEVPLETPHVHSRAPSPLYSVEFSEEPFGVIVRRQLDGRVLLNTTVAPLFFADQFLQLSTSLPSQYITGLAEHLSPLMLSTSWTRITLWNRDLAPTPGANLYGSHPFYLALEDGGSAHGVFLLNSNAMDVVLQPSPALSWRSTGGILDVYIFLGPEPKSVVQQYLDVVGYPFMPPYWGLGFHLCRWGYSSTAITRQVVENMTRAHFPLDVQWNDLDYMDSRRDFTFNKDGFRDFPAMVQELHQGGRRYMMIVDPAISSSGPAGSYRPYDEGLRRGVFITNETGQPLIGKVWPGSTAFPDFTNPTALAWWEDMVAEFHDQVPFDGMWIDMNEPSNFIRGSEDGCPNNELENPPYVPGVVGGTLQAATICASSHQFLSTHYNLHNLYGLTEAIASHRALVKARGTRPFVISRSTFAGHGRYAGHWTGDVWSSWEQLASSVPEILQFNLLGVPLVGADVCGFLGNTSEELCVRWTQLGAFYPFMRNHNSLLSLPQEPYSFSEPAQQAMRKALTLRYALLPHLYTLFHQAHVAGETVARPLFLEFPKDSSTWTVDHQLLWGEALLITPVLQAGKAEVTGYFPLGTWYDLQTVPVEALGSLPPPPAAPREPAIHSEGQWVTLPAPLDTINVHLRAGYIIPLQGPGLTTTESRQQPMALAVALTKGGEARGELFWDDGESLEVLERGAYTQVIFLARNNTIVNELVRVTSEGAGLQLQKVTVLGVATAPQQVLSNGVPVSNFTYSPDTKVLDICVSLLMGEQFLVSWC

SEQ ID NO: 317 - DNA, 3384 bp, synthetic construct
  misc_feature 1..3384: note = Synthetic
  misc_feature 1..720: note = 12450 anti-CD63 scFv
  misc_feature 721..735: note = G4S linker
  misc_feature 736..3384: note = GAA (70-952)
  source 1..3384: mol_type = other DNA
caggtgcaactacaggagtcgggcccaaaggtggtgaagccttcggagaccctgtccctcacctgcactgtctctggtggctccatcagtagttactactggaattggatccgccagtccccagggaagggactggagtggattggatataccaaaagagggtataccgactacaacccctccctcaggagtcgcgtcactatatcagaagacacgtccaagaaccagttctccctgaggatcagctctgtgaccgccgcagacacggccgtatattactgtgcacaaatggggtggggatcccatgcttttgacatgtggggccaagggacaatggtcgccgtctcttcaggaggaagtggtggaggcgggtcaggaggtggcgggagcggcggtgaaatagttttgacacagagtcccggcacactgtcactctctcccggggaaagagccaccttgtcatgtagagcaagtcagtcagtctctagctcttatctcgcctggtaccagcagaagccgggacaggcccctagactgctgatctacggggcaagttccagggccaccggaatccccgaccggttcagtggaagcggaagcggaaccgattttactttgacgatttctagactggagccagaggatttcgccgtttactattgtcaacagtacggaagcagcccgtggacgtttggccagggcacgaaggtagaaatcaagggtggtggcggttcagcacaccccggccgtcccagagcagtgcccacacagtgcgacgtcccccccaacagccgcttcgattgcgcccctgacaaggccatcacccaggaacagtgcgaggcccgcggctgttgctacatccctgcaaagcaggggctgcagggagcccagatggggcagccctggtgcttcttcccacccagctaccccagctacaagctggagaacctgagctcctctgaaatgggctacacggccaccctgacccgtaccacccccaccttcttccccaaggacatcctgaccctgcggctggacgtgatgatggagactgagaaccgcctccacttcacgatcaaagatccagctaacaggcgctacgaggtgcccttggagaccccgcatgtccacagccgggcaccgtccccactctacagcgtggagttctccgaggagcccttcggggtgatcgtgcgccggcagctggacggccgcgtgctgctgaacacgacggtggcgcccctgttctttgcggaccagttccttcagctgtccacctcgctgccctcgcagtatatcacaggcctcgccgagcacctcagtcccctgatgctcagcaccagctggaccaggatcaccctgtggaaccgggaccttgcgcccacgcccggtgcgaacctctacgggtctcaccctttctacctggcgctggaggacggcgggtcggcacacggggtgttcctgctaaacagcaatgccatggatgtggtcctgcagccgagccctgcccttagctggaggtcgacaggtgggatcctggatgtctacatcttcctgggcccagagcccaagagcgtggtgcagcagtacctggacgttgtgggatacccgttcatgccgccatactggggcctgggcttccacctgtgccgctggggctactcctccaccgctatcacccgccaggtggtggagaacatgaccagggcccacttccccctggacgtccagtggaacgacctggactacatggactcccggagggacttcacgttcaacaaggatggcttccgggacttcccggccatggtgcaggagctgcaccagggcggccggcgctacatgatgatcgtggatcctgccatcagcagctcgggccctgccgggagctacaggccctacgacgagggtctgcggaggggggttttcatcaccaacgagaccggccagccgctgattgggaaggtatggcccgggtccactgccttccccgacttcaccaaccccacagccctggcctggtgggaggacatggtggctgagttccatgaccaggtgcccttcgacggcatgtggattgacatgaacgagccttccaacttcatcaggggctctgaggacggctgccccaacaatgagctggagaacccaccctacgtgcctggggtggttggggggaccctccaggcggccaccatctgtgcctccagccaccagtttctctccacacactacaacctgcacaacctctacggcctgaccgaagccatcgcctcccacagggcgctggtgaaggctcgggggacacgcccatttgtgatctcccgctcgacctttgctggccacggccgatacgccggccactggacgggggacgtgtggagctcctgggagcagctcgcctcctccgtgccagaaatcctgcagtttaacctgctgggggtgcctctggtcggggccgacgtctgcggcttcctgggcaacacctcagaggagctgtgtgtgcgctggacccagctgggggccttctaccccttcatgcggaaccacaacagcctgctcagtctgccccaggagccgtacagcttcagcgagccggcccagcaggccatgaggaaggccctcaccctgcgctacgcactcctcccccacctctacacactgttccaccaggcccacgtcgcgggggagaccgtggcccggcccctcttcctggagttccccaaggactctagcacctggactgtggaccaccagctcctgtggggggaggccctgctcatcaccccagtgctccaggccgggaaggccgaagtgactggctacttccccttgggcacatggtacgacctgcagacggtgccagtagaggcccttggcagcctcccacccccacctgcagctccccgtgagccagccatccacagcgaggggcagtgggtgacgctgccggcccccctggacaccatcaacgtccacctccgggctgggtacatcatccccctgcagggccctggcctcacaaccacagagtcccgccagcagcccatggccctggctgtggccctgaccaagggtggggaggcccgaggggagctgttctgggacgatggagagagcctggaagtgctggagcgaggggcctacacacaggtcatcttcctggccaggaataacacgatcgtgaatgagctggtacgtgtgaccagtgagggagctggcctgcagctgcagaaggtgactgtcctgggcgtggccacggcgccccagcaggtcctctccaacggtgtccctgtctccaacttcacctacagccccgacaccaaggtcctggacatctgtgtctcgctgttgatgggagagcagtttctcgtcagctggtgt

SEQ ID NO: 318 - DNA, 3384 bp, synthetic construct
  misc_feature 1..3384: note = Synthetic
  source 1..3384: mol_type = other DNA
caggtgcaactacaggagtctggcccaaaagtggtgaaaccttctgagacccttagtctcacctgcactgtctctggtggctccataagtagttattattggaattggatcagacagtccccagggaagggactggagtggattggatataccaaaagaggctatacagattacaatccctccctcaggagtagagtcactatatcagaagacacatccaaaaatcagttcagtctgaggatcagctctgtgacagctgcagacacagcagtatattactgtgcacaaatgggttggggatcccatgcttttgatatgtggggccaagggacaatggttgcagtatcttcaggaggaagtggtggaggagggtcaggaggtggaggatctggtggtgaaatagttttgacacagagtccaggcacactgtcactctctccaggggaaagagccaccttgtcatgtagagcaagtcagtcagtctctagctcttatctggcctggtaccagcagaagccaggacaggctcctagactcctgatttatggggcaagttccagggctacaggaatcccagatagatttagtggatctggatctggaactgattttactttgacaatttctagactggagccagaggattttgctgtttattattgtcaacagtatggatctagcccatggacatttggacagggcactaaagtagaaataaagggtggtggaggttcagcacacccaggcagacctagagcagtgcccacacaatgtgatgtcccccccaactcaagatttgattgtgcccctgacaaggccatcacccaagaacagtgtgaggccagaggctgttgctatatccctgcaaagcaggggttacagggagcccagatggggcagccatggtgcttcttcccacccagctacccttcttacaaactggaaaacctgagctcctctgaaatgggctacacagccacactgaccagaaccacccccaccttctttcccaaagatatcctgaccttaagactggatgtgatgatggaaactgaaaatagattacactttacaattaaagatccagctaacaggagatatgaagtgcccttggagaccccacatgttcattcaagagcacctagcccactctactctgtggagttctcagaagagccatttggggtgattgtgagaagacaattggatggaagagtgctgctgaatacaacagtggctccccttttttttgcagaccaatttcttcagctgtctaccagtctgcccagccagtatatcacaggcctggctgaacatctcagtcccttgatgctcagcaccagctggaccaggattaccttatggaatagagaccttgccccaactccaggtgccaacctctatgggtctcaccctttttacctggcccttgaggatggagggtctgcacatggggtgtttcttctaaacagcaatgcaatggatgtggtcctacagccatctcctgcccttagctggagatccacaggtgggatcctagatgtctatattttcctgggaccagagcctaagtcagtggtgcagcagtacctggatgttgtgggatatccattcatgcctccatactggggcctgggcttccatctgtgcagatggggatattcctccacagctatcacaagacaagtggtggagaatatgaccagggcccacttccccctggatgtccagtggaatgaccttgactacatggactccagaagggatttcacatttaacaaggatggcttcagagacttccctgccatggtgcaggaactgcaccaaggaggcagaagatacatgatgatagtggatcctgccatcagtagctctggccctgctgggagctatagaccctatgatgagggtctgagaaggggggttttcatcacaaatgagactggccaacctctgattgggaaggtatggccagggtccactgctttcccagacttcactaacccaacagccctggcctggtgggaggacatggtagctgaattccatgaccaggtgccttttgatggcatgtggattgacatgaatgaaccttccaacttcatcaggggctctgaggatggctgccccaacaatgagctggaaaacccaccttatgttcctggggtggttggtgggaccctccaggcagccaccatatgtgcctccagccaccagtttctctccacacactataacctccacaacctatatggactgacagaagccattgcctcccatagggcactggtgaaggctagaggtacaagaccatttgtgatatctagaagcacttttgctggccatggcagatatgcaggccactggactggagatgtttggagctcttgggagcagctggcctccagtgtgccagaaattctgcagtttaatctactaggggtgcctttggtaggggctgatgtctgtggctttctgggcaacacctcagaagagctttgtgtgagatggacccaactgggggccttctatcccttcatgagaaaccacaatagcctgctcagtttgccccaggagccatacagcttctcagagccagcccagcaggccatgaggaaggcccttactttaagatatgcactcctcccccacttgtacacactgtttcaccaggcccatgttgcaggagaaactgtggccagacccttgttcctggagttccctaaggactcttcaacctggactgtggaccaccaactcctctggggggaggccctcctcatcacaccagttctccaggcagggaaggctgaagttactggctacttccccttgggcacatggtatgaccttcagacagttccagtagaggcacttggcagcctcccacccccacctgcagctcccagagagccagcaattcactctgaagggcaatgggtgactctgccagccccactggacaccattaatgtccatttaagagctggttatatcatacccctgcagggccctggcctcacaaccacagagtccagacagcagcctatggctctggctgtagcattgactaaaggtggggaggcaagaggggagttattctgggatgatggagagtcactggaagtgttggagagaggggcatacacacaggttatcttcttggcaaggaataacacaatagtgaatgagttagtaagagtaaccagtgagggagctggcctgcagttacagaaggtgactgtccttggagtggccactgccccccagcaagtcctatccaatggtgtccctgtatccaacttcacctacagcccagacacaaaggtcctggatatctgtgtctccctgttgatgggagaacagtttctggtcagctggtgt

SEQ ID NO: 319 - DNA, 3384 bp, synthetic construct
  misc_feature 1..3384: note = Synthetic
  source 1..3384: mol_type = other DNA
caggtccagctgcaagagtctggccccaaggtggtcaagccctctgagacactgagcctgacctgcacagtgtctggtggcagcatcagcagctactactggaactggatcagacagagccctggcaaaggcctggaatggattggctacaccaagagaggctacacagactacaaccccagcctgagaagcagagtgaccatctctgaggacaccagcaagaaccagttcagcctgaggatcagctctgtgacagctgctgacacagcagtgtactactgtgcccagatgggctggggcagccatgcctttgatatgtggggccagggcacaatggtggctgtgtccagtgggggctcaggaggaggtggctcaggaggtggaggttcaggaggggagattgtgctgacccagtctcctggcacactgtctctgagccctggggaaagagccacactgagctgtagagccagccagtctgtgtcctctagctacctggcctggtatcagcagaagcctggacaggctcccagactgctgatctatggggcctcttctagagccacaggcatccctgacagattcagtggcagtggctctggcacagacttcaccctgaccatcagcagactggaacctgaggactttgctgtgtactattgccagcagtatggcagcagcccctggacatttggacagggcaccaaggtggaaatcaaaggtggtggtggctctgcccatcctggcagacctagagctgtgcccacacagtgtgatgtgcctccaaacagcagatttgactgtgcccctgacaaggccatcacacaagagcagtgtgaagccagaggctgctgttacatccctgccaagcaaggactgcaaggggctcagatgggacagccctggtgcttcttcccaccatcttaccccagctacaagctggaaaacctgagcagctctgagatgggctacactgctacactgaccagaaccacacctacattcttcccaaaggacatcctgacactgaggctggatgtgatgatggaaacagagaacaggctgcacttcaccatcaaggaccctgccaatagaagatatgaggtgcccctggaaacccctcatgtgcactctagagccccatctccactgtactctgtggaattttctgaggaaccctttggggtcatagtcagaaggcagctggatggcagagtgctgctgaacacaactgtggcccctctgttctttgctgatcagttcctgcagctgagcaccagcctgcctagccagtatatcacaggcctggcagagcacctgtctccactgatgctgagcacatcctggaccagaatcaccctgtggaacagagacctggctcccacacctggggccaacctgtatggctctcaccccttctatctggccctggaagatggtggttcagcccatggtgtctttctgctgaactccaatgccatggatgtggtgctgcagccctctcctgctctgtcttggagaagcactggtggcatcctggatgtgtacatctttctgggccctgagcctaagtctgtggtgcagcagtacctggatgttgtgggctaccccttcatgcctccttattggggcctgggcttccacctgtgcagatggggatacagcagcacagccatcaccagacaggttgtggaaaacatgaccagagcacacttcccactggatgtgcagtggaatgacctggactacatggacagcagaagggacttcaccttcaacaaggatggcttcagagacttccctgccatggtgcaagagctgcaccaaggtggtagaagatatatgatgattgtggacccagccatcagctcctctggaccagctggcagctacagaccctatgatgagggactgagaagaggggtgttcatcaccaatgagacaggccagcctctgattggcaaagtgtggccaggctccacagcctttccagatttcacaaaccccacagctctggcttggtgggaagatatggtggcagagttccatgatcaggtgccctttgatggcatgtggattgacatgaatgagcccagcaacttcatcaggggctctgaggatggatgccccaacaatgaactggaaaatcctccttatgtgcctggtgttgttggagggacactgcaggcagccacaatttgtgccagctctcaccagtttctgagcacccactacaacctgcacaatctgtatggcctgactgaggccattgccagccacagggctcttgtgaaggctagaggcaccagaccttttgtgatcagcaggtccacctttgctggccatggcagatatgctggccactggactggggatgtgtggtctagttgggagcagctggctagctctgtgcctgagatcctgcagttcaacctgctgggagtgccccttgttggagcagatgtgtgtggcttcctgggcaacacctcagaggaactgtgtgtcagatggactcagctgggagcattctaccctttcatgagaaaccacaacagcctgctgagcctgcctcaagagccttacagcttttctgagccagcacagcaggccatgagaaaggccctgactctgagatatgccctgctgcctcacctgtacaccctgttccatcaggctcatgtggctggggagactgtggctagacccctgttcctggaattccccaaggacagctccacctggacagtggatcatcagctgctgtggggagaagccctgctgattacacctgtgctgcaggctggcaaggctgaagtgacaggctacttccctcttggcacttggtatgacctgcagacagtgcctgtggaagctctgggatctctgcctccacctcctgctgctcctagagagcctgccattcactctgaaggccagtgggttaccctgcctgctccactggataccatcaatgtgcatctgagagcaggctacatcatccctctgcaaggccctggcctgaccaccacagaatctagacagcagccaatggcactggctgtggccctgaccaaaggtggagaagctagaggggagctgttctgggatgatggggagagcctggaagtgctggaaagaggggcctatacacaagtgatttttctggctaggaacaataccattgtgaatgagcttgtcagagtcacctctgaaggtgctggcctgcagctccagaaagtgacagtgcttggagtggccacagcaccccagcaagtgctgtctaatggggtgccagtgtccaacttcacatacagccctgataccaaggtcctggacatctgtgtgtccctgcttatgggagagcagttcctggtgtcttggtgc

SEQ ID NO: 320 - DNA, 3384 bp, synthetic construct
  misc_feature 1..3384: note = Synthetic
  source 1..3384: mol_type = other DNA
caagtgcagctgcaggagtctggccctaaggtggtgaaaccatctgagacattgtccctgacttgcactgtatcaggagggtccattagtagttactactggaattggatcagacagagcccagggaagggactagagtggattggctacactaagagagggtacactgactacaaccccagcctcaggtctagagtgactatctctgaggacacctctaagaatcagttctccctgagaataagttctgtgacagcagctgacacagctgtgtactactgtgcccagatgggctggggcagtcatgcctttgacatgtggggccagggaacaatggtagctgtgagctctggaggatcaggggggggaggctctgggggggggggcagtgggggagagattgtcctaacccagtctcctggcaccctttccctttcccctggagagagagccactcttagctgcagagccagccagtctgtctccagctcttacctagcatggtaccaacaaaaacctggacaggctcctagacttcttatctatggagctagtagcagggccacaggcatcccagacaggttttcaggttctggctctggcacagacttcaccctgaccatatccagactggagccagaagattttgcagtctactactgccaacagtatggaagcagcccttggacatttggacaaggcaccaaggttgaaatcaaagggggagggggttctgcccaccctggcagacctagagcagtgcccacccagtgtgatgtgcctcctaacagcaggtttgactgtgcacctgacaaggccatcacccaggagcagtgtgaagccaggggttgctgctatatcccagccaaacagggtctgcagggagcccaaatgggccagccttggtgcttctttccaccctcttacccttcttacaagctggaaaacctatcttcaagtgagatgggctacacagccactctaacaagaaccacacctacctttttccccaaggacatcctcactctgagactggatgtaatgatggagactgaaaacagactccacttcaccattaaagacccagccaacagaagatatgaggtaccattggagaccccccatgtccacagcagagcacccagccccctatactcagtggaattctctgaggaaccttttggtgtcatagtgagaagacagctggatggcagagtgctcctcaacacaactgtggctccactgttttttgctgaccaattcctacagctgagcaccagcctgccctcccaatatatcacagggctggctgaacacctatcccctctgatgctgtccacctcctggaccaggatcactctgtggaacagggacttagcccctacccctggtgccaacctgtatggctctcacccattctacctggccctggaggatggaggttcagcccatggagtctttctcctgaactctaatgccatggatgtggtgctacagccatcccctgcattatcttggaggagcacaggaggaatcctggatgtatacatctttctgggcccagaaccaaagtcagttgtacagcagtaccttgatgtggtaggctaccccttcatgcctccatactggggtctgggcttccacctctgcagatggggctacagcagtacagctatcacaagacaggttgtggagaacatgacaagggctcacttccccctggatgtacagtggaatgacttggactacatggacagtagaagggacttcacattcaacaaggatggcttcagggacttccctgccatggtacaggaactccaccagggagggagaagatacatgatgattgtggacccagctatcagttctagtggtcctgcaggttcctacaggccctatgatgaaggcctcagaagaggagtgttcatcactaatgagacaggacagcctttgataggaaaggtctggcctggcagtacagctttcccagattttaccaatccaactgctttggcttggtgggaggacatggtggcagagttccatgaccaggtgccctttgatggcatgtggattgacatgaatgaaccatctaacttcatcagaggatcagaagatggatgccccaacaatgagctggagaaccctccttatgtgccaggtgtggtgggtggcaccctacaggctgcaaccatctgtgccagctcacaccagttcctgagtacacactacaatctacacaacctgtatggcctgactgaagctattgcctcacatagagcactagtcaaggccagagggaccaggccttttgttattagcagaagtacctttgctgggcatggcagatatgctgggcactggacaggtgatgtatggagcagctgggaacagttggcttcatctgttccagagatcctgcagttcaacctgttgggggtgcctttagtgggggcagatgtctgtggtttcttggggaacacctcagaggaactttgtgtcagatggacccaactgggggccttttacccctttatgagaaaccacaactctctgctcagcttgcctcaggaaccctattccttcagtgagcctgcccaacaggccatgaggaaggccctaaccctcagatatgcactgctgcctcacctgtacaccctttttcaccaggcccatgtggcaggtgagacagtagcaagacctctcttcttggagttccctaaagactcaagcacctggactgtggatcaccaactcctgtggggagaggctctgctgatcacacctgtactacaagctggtaaggctgaggtgacaggttacttccccctgggcacctggtatgatctgcagacagtccctgtagaggcactaggctctctgcctccccctcctgcagcccctagagagcctgctatccacagtgagggccaatgggtcaccctacctgctccactagacacaataaatgtgcacctgagagctggctatatcatccccctccagggaccaggtctgacaaccacagaatctagacaacagcccatggcactagcagttgccctgaccaagggaggtgaagccaggggtgagcttttctgggatgatggggagtccttggaggttctagaaagaggagcctacactcaggtcatcttcctggccagaaataacaccatagtgaatgagttggtgagagtgacctcagagggagctgggctccaactgcaaaaagtgacagtcttgggagtggccacagcaccacagcaggtcctcagcaatggggtgcctgtgagcaacttcacctactctccagacaccaaagtactggacatctgtgtgagcctgctgatgggtgagcaattcctggtgagctggtgc

SEQ ID NO: 321 - DNA, 3384 bp, synthetic construct
  misc_feature 1..3384: note = Synthetic
  source 1..3384: mol_type = other DNA
caagtgcagctgcaggagtctggccctaaggtggtgaaaccatctgagacattgtccctgacttgcactgtatcaggagggtccattagtagttactactggaattggatcagacagagcccagggaagggactagagtggattggctacactaagagagggtacactgactacaaccccagcctcaggtctagagtgactatctctgaggacacctctaagaatcagttctccctgagaataagttctgtgacagcagctgacacagctgtgtactactgtgcccagatgggctggggcagtcatgcctttgacatgtggggccagggaacaatggtagctgtgagctctggaggatcaggggggggaggctctggaggaggtggcagtgggggagagattgtcctaacccagtctcctggcaccctttccctttcccctggagagagagccactcttagctgcagagccagccagtctgtctccagctcttacctagcatggtaccaacaaaaacctggacaggctcctagacttcttatctatggagctagtagcagggccacaggcatcccagacaggttttcaggttctggctctggcacagacttcaccctgaccatatccagactggagccagaagattttgcagtctactactgccaacagtatggaagcagcccttggacatttggacaaggcaccaaggttgaaatcaaagggggagggggttctgcccaccctggcagacctagagcagtgcccacccagtgtgatgtgcctcctaacagcaggtttgactgtgcacctgacaaggccatcacccaggagcagtgtgaagccaggggttgctgctatatcccagccaaacagggtctgcagggagcccaaatgggccagccttggtgcttctttccaccctcttacccttcttacaagctggaaaacctatcttcaagtgagatgggctacacagccactctaacaagaaccacacctacctttttccccaaggacatcctcactctgagactggatgtaatgatggagactgaaaacagactccacttcaccattaaagacccagccaacagaagatatgaggtaccattggagaccccccatgtccacagcagagcacccagccccctatactcagtggaattctctgaggaaccttttggtgtcatagtgagaagacagctggatggcagagtgctcctcaacacaactgtggctccactgttttttgctgaccaattcctacagctgagcaccagcctgccctcccaatatatcacagggctggctgaacacctatcccctctgatgctgtccacctcctggaccaggatcactctgtggaacagggacttagcccctacccctggtgccaacctgtatggctctcacccattctacctggccctggaggatggaggttcagcccatggagtctttctcctgaactctaatgccatggatgtggtgctacagccatcccctgcattatcttggaggagcacaggaggaatcctggatgtatacatctttctgggcccagaaccaaagtcagttgtacagcagtaccttgatgtggtaggctaccccttcatgcctccatactggggtctgggcttccacctctgcagatggggctacagcagtacagctatcacaagacaggttgtggagaacatgacaagggctcacttccccctggatgtacagtggaatgacttggactacatggacagtagaagggacttcacattcaacaaggatggcttcagggacttccctgccatggtacaggaactccaccagggagggagaagatacatgatgattgtggacccagctatcagttctagtggtcctgcaggttcctacaggccctatgatgaaggcctcagaagaggagtgttcatcactaatgagacaggacagcctttgataggaaaggtctggcctggcagtacagctttcccagattttaccaatccaactgctttggcttggtgggaggacatggtggcagagttccatgaccaggtgccctttgatggcatgtggattgacatgaatgaaccatctaacttcatcagaggatcagaagatggatgccccaacaatgagctggagaaccctccttatgtgccaggtgtggtgggtggcaccctacaggctgcaaccatctgtgccagctcacaccagttcctgagtacacactacaatctacacaacctgtatggcctgactgaagctattgcctcacatagagcactagtcaaggccagagggaccaggccttttgttattagcagaagtacctttgctgggcatggcagatatgctgggcactggacaggtgatgtatggagcagctgggaacagttggcttcatctgttccagagatcctgcagttcaacctgttgggggtgcctttagtgggggcagatgtctgtggtttcttggggaacacctcagaggaactttgtgtcagatggacccaactgggggccttttacccctttatgagaaaccacaactctctgctcagcttgcctcaggaaccctattccttcagtgagcctgcccaacaggccatgaggaaggccctaaccctcagatatgcactgctgcctcacctgtacaccctttttcaccaggcccatgtggcaggtgagacagtagcaagacctctcttcttggagttccctaaagactcaagcacctggactgtggatcaccaactcctgtggggagaggctctgctgatcacacctgtactacaagctggtaaggctgaggtgacaggttacttccccctgggcacctggtatgatctgcagacagtccctgtagaggcactaggctctctgcctccccctcctgcagcccctagagagcctgctatccacagtgagggccaatgggtcaccctacctgctccactagacaccatcaatgtgcacctgagagctggctatatcatccccctccaaggaccaggtctgacaaccacagaatctagacaacagcccatggcactagcagttgccctgaccaagggaggtgaagccaggggtgagcttttctgggatgatggggagtccttggaggttctagaaagaggagcctacactcaggtcatcttcctggccagaaataacaccatagtgaatgagttggtgagagtgacctcagagggagctgggctccaactgcaaaaagtgacagtcttgggagtggccacagcaccacagcaggtcctcagcaatggggtgcctgtgagcaacttcacctactctccagacaccaaagtactggacatctgtgtgagcctgctgatgggtgagcaattcctggtgagctggtgc

SEQ ID NO: 322 - DNA, 3384 bp, synthetic construct
  misc_feature 1..3384: note = Synthetic
  source 1..3384: mol_type = other DNA
caggtacagctgcaggagtctgggcccaaagtagtgaaaccctctgaaaccctatcactgacctgcacagtttcaggtggaagcattagcagttactactggaactggatcagacagagtccaggcaagggtctggaatggataggctacaccaagagaggttacactgactacaacccatcccttcggtccagagtgaccatttcagaggacacatctaaaaaccagttctccctgagaatcagttctgtgactgctgctgacacagctgtgtactactgtgctcagatgggctggggctcccatgcctttgacatgtggggccagggcaccatggttgcagtgagctctggtggctctggaggaggtggatctggagggggaggctcaggaggtgagattgtgctgacccaaagtcctggcacattgagcctgagccctggagaaagggccactctctcttgcagggccagccagtctgtgtccagttcctacctggcttggtaccaacagaagcctggccaggcccctaggttgctgatctatggagccagctccagagccacagggatccctgacagattctcaggctctggctctggcacagacttcaccctgaccatcagcagactagagcctgaagactttgctgtgtactactgccagcagtatggaagcagcccttggacttttgggcagggcacaaaggttgagatcaaaggaggaggaggctcagcccaccctggcagacccagagcagtccccacccagtgtgatgtacctcccaacagcagatttgactgtgcccctgacaaggccatcacccaggaacagtgtgaggccagggggtgctgctatattcctgccaagcagggcctgcagggtgcccaaatgggccagccttggtgcttcttccctcccagctacccctcttacaagttagaaaacctgtctagctctgaaatgggctacacagccaccctgaccagaacaacccctactttcttcccaaaggacattttaaccctgaggctggatgtgatgatggagactgagaatagactgcacttcaccatcaaggacccagccaacagaaggtatgaagtgcctctggagaccccccatgtgcactctagggcacctagccctctatactcagtggagttctctgaagaaccttttggggtcatagtgaggaggcaactggatggcagagtgcttctgaacaccacagtggcccccctgttctttgctgaccaattcctgcagctgagtaccagcctgccttcacagtacatcacaggcctggctgaacacctgagccctctgatgttgagcaccagctggaccagaatcaccttatggaacagagacttagccccaacccctggagccaacctctatggaagccaccctttctacctggccctggaggatggaggctctgcccatggtgttttcctcctgaactccaatgccatggatgttgtgctgcaaccttcccctgctctgagctggagatcaacagggggtatcttagatgtgtacatcttcctgggccctgaaccaaagtctgtggtacagcagtacctggatgtagtgggctaccccttcatgcccccctactggggcctaggcttccacctgtgcaggtgggggtactctagcactgccatcaccagacaggtggtggagaacatgactagagcccactttccattggatgtgcaatggaatgaccttgactacatggactcaaggagggacttcacattcaacaaggatggcttcagagactttcctgccatggtgcaggagctgcaccaagggggcagaagatacatgatgattgtggacccagccatctcctcttcaggacctgctggttcttatagaccttatgatgagggccttagaagaggtgtgttcattaccaatgaaactggacagcctctgattggcaaggtgtggccaggctccactgccttccctgactttacaaaccctacagccctggcctggtgggaggatatggtagctgagttccatgaccaggtgccttttgatggcatgtggatagacatgaatgaaccaagtaacttcatcagaggtagtgaggatggctgtcccaacaatgagctggagaaccccccatatgttcctggagtggtgggtggtactctccaggctgctaccatttgtgcctcaagtcaccagttcctgagcacccactacaacctgcacaacctgtatggcctgactgaggctattgctagccacagggctctggtgaaggccaggggaacaagaccttttgtgatttctaggtcaacatttgcaggccatggaagatatgctggtcactggacaggtgatgtgtggtcttcctgggaacagctggccagttcagtgccagagatcctgcagttcaacctcctaggagtgccactggtgggggcagatgtttgtggctttctggggaacacctctgaagagctgtgtgtgagatggacccagctgggagccttctacccattcatgaggaaccacaacagtttgctttccctacctcaggagccctacagcttctctgagccagcccaacaggccatgagaaaggccttgacacttagatatgccctactgccccacttgtataccttattccaccaggctcatgtggctggtgagactgtggccaggcccctgttcctggagttccccaaggacagctccacctggacagtagaccatcagctcctgtggggagaggccctgcttatcacccctgtgctccaagctggcaaagcagaggtgacaggttacttccctctgggcacctggtatgatctccagacagtgcctgtggaagcattaggttctttgcctcctccacctgcagcccccagagagcctgccatccactctgaaggccagtgggtcaccctgcctgcccccctggacacaatcaatgtccacctgagagctggttacataatccctctgcaagggcctggcttgaccaccacagaaagcagacagcagcctatggccctggctgtagctctgactaagggaggtgaggcaagaggggagctgttctgggatgatggagagagcctggaagtgctagagagaggagcctacacccaagtcatcttcttggccaggaacaataccatagtgaatgagctggtgagggtgacctctgaaggggctggccttcaactccagaaggtgactgttctgggagtggccacagccccacagcaggtgctgtccaatggtgtgcctgtcagcaacttcacatacagcccagatactaaggtgctggatatctgtgttagccttctcatgggtgaacagttcttagtgtcatggtgc

SEQ ID NO: 323 - DNA, 3384 bp, synthetic construct
  misc_feature 1..3384: note = Synthetic
  source 1..3384: mol_type = other DNA
caggtgcagctgcaggagtctggccctaaggttgtgaaaccttctgagaccctgagcctgacttgcacagtgtcagggggctctatcagctcatactactggaactggatcagacaaagccctggcaagggcctggaatggattggctacactaagagaggctacacagactacaaccctagcctcaggagccgagtgaccatctcagaggacacatccaagaaccaattctcactgcggattagctctgtgacagctgctgacacagctgtgtactactgtgcccagatgggctggggcagccatgcctttgacatgtggggccagggcaccatggtggctgtgagctctgggggctcaggaggaggtggctcaggcggtggcggctccgggggggaaattgtcctcacccagagccctggcaccctgagcctgagccctggcgaaagagccacactgagctgcagggccagccagtcagtgtccagcagctacctggcttggtaccagcagaagcctggccaggcgccccggctgctgatttatggtgcctcatcccgggccacaggaatccctgacagatttagtggcagtggcagcgggactgactttacactgaccatcagcagactggaacctgaggattttgcagtgtactactgccagcagtatggcagcagcccttggacctttggccagggcaccaaggtggaaatcaagggaggggggggctcagcccaccctggcagacctagagctgtgcctacccagtgtgatgtgccacctaactccagatttgactgtgcccctgacaaggccatcacccaagagcagtgcgaggccaggggatgctgctacatccctgccaaacagggcctgcagggagcccagatgggccaaccctggtgctttttccctccctcttacccctcctacaagctggagaacctgagctcctcagagatgggctacacagctaccctgaccagaaccacccccaccttctttcctaaggacatcctgaccctgagactggatgtgatgatggaaacagagaaccggctgcacttcacaatcaaggacccagccaacagaagatatgaagttcccctggagacccctcatgtgcactccagggcccccagccccctatacagcgtggagttctctgaggagccttttggcgtcattgtgagaagacaactggatggcagagtgctgttgaacaccacagtggcccctctcttctttgctgaccaattcctgcagctgagcaccagtctgcccagccagtacatcactggcctggctgagcacctgtctcccttaatgctgtccaccagctggacaaggatcaccctgtggaaccgggacttggcccccacgcctggagccaacctatacggctcccaccccttctacctggccctggaggacggaggctcagcccatggagttttcctgctgaactctaacgccatggatgtggtgctgcaacctagccctgccctgagctggagaagcactggcggaattctcgatgtctacatcttcctgggacctgaaccaaagtcagtggtgcagcagtacctggatgtggtgggctaccccttcatgccaccttactggggcctgggatttcacctgtgcagatggggctactccagcacagccatcaccagacaggtggtggagaacatgacccgggcccacttccccctggatgtccagtggaatgacttagactacatggatagcagaagagacttcaccttcaacaaggatggctttagagacttccctgccatggtgcaggaactgcaccagggtggcagaagatacatgatgattgtggaccctgccatttctagctctggcccagcaggctcctacaggccctatgatgagggactgcggagaggggtcttcatcaccaatgagacaggccagccactgatcggcaaggtgtggcctggatccacagccttcccagacttcaccaaccctacagcccttgcctggtgggaagacatggtggccgaattccacgaccaggtgccctttgatggcatgtggatcgacatgaatgagcctagcaatttcatcagaggaagtgaggatggctgccccaacaatgaattagaaaacccgccctatgtgcctggcgttgtgggaggcaccctccaggctgccaccatctgtgccagcagccaccagttcttatccacacactacaacctgcacaacctgtatggcctgaccgaagccattgccagccacagagcgctggtgaaagccaggggcacccggccttttgtgatcagcagaagcaccttcgctggccatggcaggtatgccggacattggacaggagatgtatggagctcttgggagcagttggccagctctgtgcctgagatcctgcagttcaacctactgggggtccctctggtgggagcagatgtctgcggcttcctaggcaacacctcagaggaactgtgcgtaagatggacccagctgggggccttctaccctttcatgaggaaccacaactctctgctgagcctgcctcaggagccatacagcttctctgagccagcccagcaggccatgagaaaggccctgaccctgagatatgccttactgccccacctgtacacactgttccaccaggcccatgtggctggggagacagtggcacggcccctgttcttggagttccccaaggactccagcacctggacagtggaccaccagctgctctggggagaggccctgctcatcaccccagtgctgcaggctggcaaggctgaagtcacaggctacttccccctgggcacctggtatgacctccaaactgtgccagtggaggccctgggcagcctgcctcctccccctgctgctcctagagagcctgccatccactcggagggccagtgggtgacactgcctgcccccctagacaccatcaatgttcacctgagagcaggctacatcatcccactgcaaggccctggcctgaccaccactgagagcagacagcagcccatggccctggcagttgccctgaccaagggcggcgaagccagaggagaactgttctgggatgatggcgaatctttggaagtgctggagagaggggcctacacccaggtgatcttcctggcccggaacaacactatagtgaatgaactggtgcgggtgacatcagagggtgcaggcctgcagctgcaaaaagtgacagtgctgggtgtggcaacagcccctcagcaggtactatccaatggagtgccagtgagcaacttcacctacagcccagacactaaggtgctagacatctgtgtttctctgctgatgggagagcaattcctggtgagctggtgc

SEQ ID NO: 324 - DNA, 3384 bp, synthetic construct
  misc_feature 1..3384: note = Synthetic
  source 1..3384: mol_type = other DNA
caggtgcagctgcaggagtctggccctaaggttgtgaaaccttctgagaccctgagcctgacttgcacagtgtcagggggctctatcagctcatactactggaactggatcagacaaagccctggcaagggcctggaatggattggctacactaagagaggctacacagactacaaccctagcctcaggagccgagtgaccatctcagaggacacatccaagaaccaattctcactgcggattagctctgtgacagctgctgacacagctgtgtactactgtgcccagatgggctggggcagccatgcctttgacatgtggggccagggcaccatggtggctgtgagctctgggggctcaggaggaggtggctcaggcggtggcggctccgggggggaaatcgtgctcacccagagccctggcaccctgagcctgagccctggcgaaagagccacactgagctgcagggccagccagtcagtgtccagcagctacctggcttggtaccagcagaagcctggccaggcgccccggctgctgatttatggtgcctcatcccgggccacaggaatccctgacagatttagtggcagtggcagcgggactgactttacactgaccatcagcagactggaacctgaggattttgcagtgtactactgccagcagtatggcagcagcccttggacctttggccagggcaccaaggtggaaatcaagggaggggggggctcagcccaccctggcagacctagagctgtgcctacccagtgtgatgtgccacctaactccagatttgactgtgcccctgacaaggccatcacccaagagcagtgcgaggccaggggatgctgctacatccctgccaaacagggcctgcagggagcccagatgggccaaccctggtgctttttccctccctcttacccctcctacaagctggagaacctgagctcctcagagatgggctacacagctaccctgaccagaaccacccccaccttctttcctaaggacatcctgaccctgagactggatgtgatgatggaaacagagaaccggctgcacttcacaatcaaggacccagccaacagaagatatgaagttcccctggagacccctcatgtgcactccagggcccccagccccctatacagcgtggagttctctgaggagccttttggcgtcattgtgagaagacaactggatggcagagtgctgttgaacaccacagtggcccctctcttctttgctgaccaattcctgcagctgagcaccagtctgcccagccagtacatcactggcctggctgagcacctgtctcccttaatgctgtccaccagctggacaaggatcaccctgtggaaccgggacttggcccccacgcctggagccaacctatacggctcccaccccttctacctggccctggaggacggaggctcagcccatggagttttcctgctgaactctaacgccatggatgtggtgctgcaacctagccctgccctgagctggagaagcactggcggaattctcgatgtctacatcttcctgggacctgaaccaaagtcagtggtgcagcagtacctggatgtggtgggctaccccttcatgccaccttactggggcctgggatttcacctgtgcagatggggctactccagcacagccatcaccagacaggtggtggagaacatgacccgggcccacttccccctggatgtccagtggaatgacttagactacatggatagcagaagagacttcaccttcaacaaggatggctttagagacttccctgccatggtgcaggaactgcaccagggtggcagaagatacatgatgatcgttgaccctgccatttctagctctggcccagcaggctcctacaggccctatgatgagggactgcggagaggggtcttcatcaccaatgagacaggccagccactgatcggcaaggtgtggcctggatccacagccttcccagacttcaccaaccctacagcccttgcctggtgggaagacatggtggccgaattccacgaccaggtgccctttgatggcatgtggatcgacatgaatgagcctagcaatttcatcagaggaagtgaggatggctgccccaacaatgaattagaaaacccgccctatgtgcctggcgttgtgggaggcaccctccaggctgccaccatctgtgccagcagccaccagttcttatccacacactacaacctgcacaacctgtatggcctgaccgaagccattgccagccacagagcgctggtgaaagccaggggcacccggccttttgtgatcagcagaagcaccttcgctggccatggcaggtatgccggacattggacaggagacgtctggagctcttgggagcagttggccagctctgtgcctgagatcctgcagttcaacctactgggggtccctctggtgggagcagatgtctgcggcttcctaggcaacacctcagaggaactgtgcgtaagatggacccagctgggggccttctaccctttcatgaggaaccacaactctctgctgagcctgcctcaggagccatacagcttctctgagccagcccagcaggccatgagaaaggccctgaccctgagatatgccttactgccccacctgtacacactgttccaccaggcccacgtcgctggggagacagtggcacggcccctgttcttggagttccccaaggactccagcacctggacagtggaccaccagctgctctggggagaggccctgctcatcaccccagtgctgcaggctggcaaggctgaagtcacaggctacttccccctgggcacctggtatgacctccaaactgtgccagtggaggccctgggcagcctgcctcctccccctgctgctcctagagagcctgccatccactcggagggccagtgggtgacactgcctgcccccctagacaccatcaatgttcacctgagagcaggctacatcatcccactgcaaggccctggcctgaccaccactgagagcagacagcagcccatggccctggccgttgccctgaccaagggcggcgaagccagaggagaactgttctgggatgatggcgaatctttggaagtgctggagagaggggcctacacccaggtgatcttcctggcccggaacaacactatcgttaatgaactggtgcgggtgacatcagagggtgcaggcctgcagctgcaaaaagtgacagtgctgggtgtggcaacagcccctcagcaggtactatccaatggagtgccagtgagcaacttcacctacagcccagacactaaggtgctagacatctgtgtttctctgctgatgggagagcaattcctggtgagctggtgc

SEQ ID NO: 325 - DNA, 3384 bp, synthetic construct
  misc_feature 1..3384: note = Synthetic
  source 1..3384: mol_type = other DNA
caggtgcagctgcaggaatctggacctaaggtggtgaagccttctgaaacactgtctctgacatgtacagtgtctggaggatctatctcttcttattattggaattggatcagacagtctcctggaaagggactggaatggatcggatatacaaagagaggatatacagattataatccttctctgagatctagagtgacaatctctgaagatacatctaagaatcagttttctctgagaatctcttctgtgacagctgctgatacagctgtgtattattgtgctcagatgggatggggatctcatgcttttgatatgtggggacagggaacaatggtggctgtgtcttctggaggatctggaggaggaggatctggaggaggaggatctggaggagaaatcgtgctgacacagtctcctggaacactgtctctgtctcctggagaaagagctacactgtcttgtagagcttctcagtctgtgtcttcttcttatctggcttggtatcagcagaagcctggacaggctcctagactgctgatctatggagcttcttctagagctacaggaatccctgatagattttctggatctggatctggaacagattttacactgacaatctctagactggaacctgaagattttgctgtgtattattgtcagcagtatggatcttctccttggacatttggacagggaacaaaggtggaaatcaagggaggaggaggatctgctcatcctggaagacctagagctgtgcctacacagtgtgatgtgcctcctaattctagatttgattgtgctcctgataaggctatcacacaggaacagtgtgaagctagaggatgttgttatatccctgctaagcagggactgcagggagctcagatgggacagccttggtgtttttttcctccttcttatccttcttataagctggaaaatctgtcttcttctgaaatgggatatacagctacactgacaagaacaacacctacattttttcctaaggatatcctgacactgagactggatgtgatgatggaaacagaaaatagactgcattttacaatcaaggatcctgctaatagaagatatgaagtgcctctggaaacacctcatgtgcattctagagctccttctcctctgtattctgtggaattttctgaagaaccttttggagtgatcgtgagaagacagctggatggaagagtgctgctgaatacaacagtggctcctctgttttttgctgatcagtttctgcagctgtctacatctctgccttctcagtatatcacaggactggctgaacatctgtctcctctgatgctgtctacatcttggacaagaatcacactgtggaatagagatctggctcctacacctggagctaatctgtatggatctcatcctttttatctggctctggaagatggaggatctgctcatggagtgtttctgctgaattctaatgctatggatgtggtgctgcagccttctcctgctctgtcttggagatctacaggaggaatcctggatgtgtatatctttctgggacctgaacctaagtctgtggtgcagcagtatctggatgtggtgggatatccttttatgcctccttattggggactgggatttcatctgtgtagatggggatattcttctacagctatcacaagacaggtggtggaaaatatgacaagagctcattttcctctggatgtgcagtggaatgatctggattatatggattctagaagagattttacatttaataaggatggatttagagattttcctgctatggtgcaggaactgcatcagggaggaagaagatatatgatgatcgtggatcctgctatctcttcttctggacctgctggatcttatagaccttatgatgaaggactgagaagaggagtgtttatcacaaatgaaacaggacagcctctgatcggaaaggtgtggcctggatctacagcttttcctgattttacaaatcctacagctctggcttggtgggaagatatggtggctgaatttcatgatcaggtgccttttgatggaatgtggatcgatatgaatgaaccttctaattttatcagaggatctgaagatggatgtcctaataatgaactggaaaatcctccttatgtgcctggagtggtgggaggaacactgcaggctgctacaatctgtgcttcttctcatcagtttctgtctacacattataatctgcataatctgtatggactgacagaagctatcgcttctcatagagctctggtgaaggctagaggaacaagaccttttgtgatctctagatctacatttgctggacatggaagatatgctggacattggacaggagatgtgtggtcttcttgggaacagctggcttcttctgtgcctgaaatcctgcagtttaatctgctgggagtgcctctggtgggagctgatgtgtgtggatttctgggaaatacatctgaagaactgtgtgtgagatggacacagctgggagctttttatccttttatgagaaatcataattctctgctgtctctgcctcaggaaccttattctttttctgaacctgctcagcaggctatgagaaaggctctgacactgagatatgctctgctgcctcatctgtatacactgtttcatcaggctcatgtggctggagaaacagtggctagacctctgtttctggaatttcctaaggattcttctacatggacagtggatcatcagctgctgtggggagaagctctgctgatcacacctgtgctgcaggctggaaaggctgaagtgacaggatattttcctctgggaacatggtatgatctgcagacagtgcctgtggaagctctgggatctctgcctcctcctcctgctgctcctagagaacctgctatccattctgaaggacagtgggtgacactgcctgctcctctggatacaatcaatgtgcatctgagagctggatatatcatccctctgcagggacctggactgacaacaacagaatctagacagcagcctatggctctggctgtggctctgacaaagggaggagaagctagaggagaactgttttgggatgatggagaatctctggaagtgctggaaagaggagcttatacacaggtgatctttctggctagaaataatacaatcgtgaatgaactggtgagagtgacatctgaaggagctggactgcagctgcagaaggtgacagtgctgggagtggctacagctcctcagcaggtgctgtctaatggagtgcctgtgtctaattttacatattctcctgatacaaaggtgctggatatctgtgtgtctctgctgatgggagaacagtttctggtgtcttggtgt

SEQ ID NO: 326 - DNA, 2649 bp, synthetic construct
  misc_feature 1..2649: note = Synthetic
  source 1..2649: mol_type = other DNA
gcacatccaggcaggcccagagcagttcccacacaatgtgatgtcccccccaactcaaggtttgattgtgcccctgataaggctatcactcaggaacagtgtgaagctaggggctgttgctacattcctgcaaagcagggactgcagggagcccagatggggcagccttggtgctttttcccaccatcttaccccagctacaaactagagaacctgagctcctctgaaatgggctacactgccactctaaccagaaccacccccactttctttcccaaggacatcctgaccctgagactagatgtgatgatggagactgagaataggctccactttactatcaaagatccagctaacaggaggtatgaggtgcctttggagacaccccatgtccacagcagagcaccctccccactctacagtgttgagtttagtgaggaaccttttggtgtgatagttaggagacagttggatggtagggtgctgttgaacacaactgtggcacccctgttctttgcagaccaattccttcagttgtccacctccctgccttcacagtatatcacaggcctggcagagcacctcagtcccttgatgctctcaacctcttggactagaatcaccctctggaacagggaccttgcacccacacctggtgcaaacctctatgggtctcaccctttttacttggcactggaagatggagggtctgcacatggggtgttcttactaaattcaaatgccatggatgtggtcctgcagccaagccctgcccttagctggaggagcacaggtgggatattggatgtctacattttcctgggcccagagccaaagtcagtggtgcaacagtacctggatgttgttggatatccctttatgcctccatactggggcctgggcttccacctgtgcaggtggggctacagttccacagctataaccagacaggtggtggagaacatgacaagagcccacttcccactggatgtccaatggaatgatctggattatatggattccaggagggacttcacatttaataaggatggcttcagggactttccagccatggtgcaggagctgcatcagggaggcaggagatatatgatgatagtggatcctgccatcagcagcagtggccctgcagggtcatacaggccctatgatgagggtctgaggaggggagtttttataaccaatgagacaggccaacccctgattgggaaagtatggccaggatccactgcttttccagacttcaccaaccccacagccttagcctggtgggaggacatggtggctgagttccatgaccaggttccctttgatggcatgtggattgatatgaatgaacctagtaactttataaggggctctgaagatggctgccccaataatgaactggagaatccaccctatgtgcctggggtggttggggggactctccaggcagccaccatatgtgcatcctcacatcagtttctctccacacactacaaccttcataacctctatggccttacagaagccatagcatcccatagggcactggttaaggctagggggacaaggccatttgtgatctccaggagtacttttgctggccatggcaggtatgctggccattggacaggggatgtgtggtcatcctgggagcagctggcctccagtgttccagaaatactgcagtttaatcttttgggggttcctctggttggggcagatgtatgtggctttctgggcaacacctcagaagaactgtgtgttaggtggacccagctaggtgccttctaccccttcatgaggaatcacaatagcctattaagtctgccacaggagccatattctttcagtgagccagcccaacaggctatgaggaaagccctcaccctgaggtatgcactcctcccccacctttacacattattccaccaggcccatgtggcaggagagacagtggccaggcccctcttccttgaattccccaaagattctagcacctggactgtggaccatcagctcctgtggggggaggcactgctcatcacaccagtgttacaggcagggaaggctgaagtgactggctattttccattgggcacatggtatgacctgcagactgtgccagtagaagcccttggcagcctcccacccccacctgcagctccaagggaaccagccatccacagtgaggggcaatgggtaacactgccagctcccctggacaccatcaatgtccaccttagggctgggtacattattcccttgcagggccctggcttaacaaccacagagtctagacaacagcctatggctctggctgtggccctgaccaagggtggagaggccaggggggagttgttctgggatgatggagaaagcctggaagtgctagagaggggggcctacacacaggtcatttttctggctaggaataatacaattgtgaatgaacttgtaagggtgacaagtgagggagctggcctacagctgcagaaggtgactgtcctgggagtggccacagcacctcagcaagtcctctctaatggtgtccctgtctccaatttcacttacagcccagacaccaaagtcctggacatttgtgtcagcctgttgatgggagagcagtttcttgtctcctggtgt

SEQ ID NO: 327 - DNA, 2649 bp, synthetic construct
  misc_feature 1..2649: note = Synthetic
  source 1..2649: mol_type = other DNA
gcacaccctgggagacccagggcagtacctacccagtgtgatgttcctcccaacagtagatttgactgtgctccagacaaggccatcacacaggaacaatgtgaggccagaggttgctgctacatccctgctaagcaagggctccagggggcccagatggggcagccttggtgcttcttcccacccagctacccctcctacaaactggagaacctgagctcctctgagatgggctacactgccaccctgactagaacaacacctacctttttccctaaggacatcctgactctgaggttagatgtgatgatggaaactgaaaacaggctgcacttcaccatcaaggaccctgccaacaggagatatgaagttcctctggagacacctcatgttcacagcagagccccttcacccctgtattctgtggaattctctgaagaaccatttggagttatagtgagaagacaactggatggcagagtgctcctgaacacaacagtggcccctctgttctttgctgaccagtttctgcagctgagcactagcctgccttcccagtatatcactggcctggctgagcaccttagccctctgatgctcagcacatcttggactagaataacactatggaacagagacctggctccaaccccaggtgctaatctgtatggcagtcatcctttctacctggctctggaggatggagggtctgcccatggtgtgttcctgctgaactcaaatgcaatggatgttgtgttacagcctagccctgcattgagctggagaagtacaggtggaattctggatgtctacatattcttggggcctgagcctaagtctgtagtgcaacagtacctggatgttgttggctacccatttatgcctccctactggggcctaggattccacctgtgcagatggggctactccagtactgccatcaccagacaggtggttgagaacatgaccagggcccactttcctttagatgtgcagtggaatgatctggactacatggatagcagaagggacttcaccttcaacaaggatggttttagagacttccctgccatggtccaggagttgcaccaggggggcagaagatacatgatgatagtagacccagctatcagcagttcaggcccagcagggagctacaggccctatgatgagggcctgagaagaggtgtcttcatcactaatgagacaggccagccactgattggcaaagtgtggcctggctcaactgctttccctgatttcacaaaccctacagccttagcatggtgggaggatatggtggctgaattccatgaccaggtgccatttgatggcatgtggattgacatgaatgagccaagcaacttcatcagaggctctgaggatggctgccccaacaatgaactggaaaaccctccctatgtcccaggagtggtgggaggaaccctgcaggcagctacaatctgtgcctcttcccaccagttcctaagcacccactacaacctccataacctgtatgggttgacagaggccatagcctcccacagagccctggtcaaggctagaggcactaggccatttgtcatctctagatctacctttgctggccatggcaggtatgcaggccactggacaggtgatgtgtggagcagctgggaacaacttgccagcagtgtacctgagatcctccaatttaacctgctgggtgttcccctagtgggagctgatgtatgtgggttcctgggcaatacatcagaagagctctgtgtaaggtggacccagctaggggccttttacccattcatgagaaaccacaactctctcctgagccttccacaagaaccttactctttctctgagcctgctcagcaagccatgaggaaagcactgacattaagatatgcactgctgcctcacctttacaccctgttccaccaggcacatgtggcaggagaaacagtagccagacccctgttcttagagtttcccaaggactcttcaacctggactgtggaccaccagctcctatggggagaggccctgttaatcacccctgtgctgcaggctggtaaggctgaagttacaggctactttcccttaggcacatggtatgatttgcagacagtccctgtggaggccctgggatctcttcctcctcccccagctgctcctagggagcctgcaatccactctgagggacagtgggtaaccctcccagctccactggacaccatcaatgtacaccttagggctggatacattatccccctgcaaggccctggcctgaccacaacagagagcaggcagcagcctatggccctagctgttgcccttaccaagggaggggaagccagaggagagctcttctgggatgatggagagagccttgaagtgcttgaaaggggggcctacacacaagtgatcttcctggccagaaacaacactattgtgaatgagttggtgagagtcacaagtgaaggggctggtcttcaactccagaaagtgactgtgttaggagttgcaacagcaccacagcaggttctctctaatggggtaccagtgtctaacttcacatacagccctgacaccaaggtgctggacatctgtgtgtctttattgatgggtgaacagttcctggtgtcttggtgc

SEQ ID NO: 328 - DNA, 2649 bp, synthetic construct
  misc_feature 1..2649: note = Synthetic
  source 1..2649: mol_type = other DNA
gcacaccctggcaggcccagagcagtgcccacacagtgtgatgtcccaccaaatagcaggtttgattgtgcccctgacaaggctattacccaggaacagtgtgaagccagaggctgttgctacatccctgcaaaacaggggttgcagggagcacagatggggcagccctggtgcttcttcccaccatcttacccaagctataagttagaaaatctgtcatcctctgaaatgggctacactgccaccttgacaaggaccacccccacattcttccccaaagacatcctgacccttaggctggatgtgatgatggagactgagaacaggctccactttactatcaaagatccagctaacaggaggtatgaggtgcccttggagactcctcatgtccattcaagggcaccttccccactctactcagtggagttttcagaggagccctttggggttattgtgaggagacagctggatggcagagtgctgctgaacactactgtggcccctctgttctttgctgaccagttccttcagctgtcaacttctctgccatcacagtatatcacaggcctagctgagcacctcagtcccctgatgctcagcaccagctggacaagaattactctttggaacagagaccttgcacccactccaggtgctaatctctatgggtctcaccctttctacctggccctagaggatgggggctcagcacatggggtgttcttgctaaatagcaatgccatggatgtggtcttacagccttctcctgcccttagctggaggtctacaggtggaatactggatgtctacatctttctgggcccagagcccaagtctgttgtgcagcaatacctggatgttgtaggatatccctttatgccaccatattggggactgggcttccatttatgcaggtggggctactcctccactgctattaccaggcaagtggttgaaaacatgacaagggcccactttcccctggatgtacagtggaatgatcttgattacatggactccaggagggactttacatttaataaagatggcttcagggatttccctgccatggtgcaggagctgcaccagggaggcaggaggtacatgatgatagtggatcctgccatcagcagctcaggccctgctgggtcatataggccttatgatgaaggtcttaggaggggggtttttattaccaatgaaactggccaaccacttattggcaaggtatggcctggttcaactgccttccctgacttcaccaaccccacagccctggcctggtgggaggatatggtggctgaatttcatgaccaggttccttttgatggcatgtggattgatatgaatgagccttccaactttatcaggggctctgaagatggctgccccaataatgagctggagaacccaccctatgttcctggggtggttgggggtaccctccaggctgccactatctgtgcctccagccatcagtttctctccacacactacaacttgcacaacctctatggcctgactgaagccattgcctctcatagggctttggttaaggctagggggacaagaccatttgtgatctccaggtcaacttttgctggccatggcaggtatgctggccattggactggtgatgtgtggagctcctgggagcaactagcttcatcagtgccagaaatcctgcagtttaatctgctaggggttcctctggttggtgctgatgtctgtggctttttgggcaacacctcagaggaactatgtgtgaggtggacccagctgggagccttctaccccttcatgaggaaccataacagcctgctcagtctgccccaggagccttactcattctcagagcctgcccagcaggctatgaggaaggccctcaccctgaggtatgcactcctcccccacctctacacactgttccaccaagcccatgtagctggggaaactgttgccaggcccctctttctggaattccccaaggactctagcacctggactgtggatcatcaactcctttggggggaagcccttctcatcacaccagtgctccaggctgggaaagctgaagtgactggctatttccccttgggcacatggtatgacctgcagactgtgccagtagaggcccttggctctttaccacccccacctgcagctccaagggaaccagcaatccactctgagggtcagtgggtgactttgcctgcccccttagacacaataaatgtccacctcagagctgggtacatcattcccctgcagggtcctggcctcacaaccacagagtccaggcaacagcccatggctctggctgtggccctgacaaagggtggggaggccaggggggagcttttctgggatgatggagagagcctggaagtgctggagaggggggcctacacacaggtcatattcctggctaggaataacactatagtgaatgaattggtaagggtgaccagtgagggagctggcttgcagctgcagaaggtgactgtcctgggggtggccactgcaccccagcaggtcctttccaatggtgtccctgtctccaacttcacttacagccctgacaccaaggtcttggacatttgtgtttcattattgatgggagagcagtttctagtgagctggtgt

SEQ ID NO: 329 - DNA, 2649 bp, synthetic construct
  misc_feature 1..2649: note = Synthetic
  source 1..2649: mol_type = other DNA
gcccaccctggcaggcctagagctgtgcctacacaatgtgatgtgccacctaacagcagatttgactgtgcacctgacaaggccataacccaggaacagtgtgaggctagagggtgctgctacatccctgctaagcagggactgcaaggagctcagatgggtcagccctggtgcttctttcccccatcctaccctagttacaaactagaaaatctgagcagttctgagatgggctacacagccaccctgactagaaccactccaaccttcttcccaaaggacatcttaactctcagactggatgtaatgatggaaactgagaatagattgcacttcactatcaaagacccagccaacagaagatatgaagttcctctagaaacacctcatgtgcactctagagccccttcccctctgtacagtgtagagttctctgaagagccttttggggtgattgttagaaggcagttggatgggagggtgctgttgaacaccacagtggcccccctgttctttgctgaccagttccttcagctgagtacttctctcccaagtcagtatatcacaggtctggctgagcacctgtcccctctcatgctgtctaccagctggacaagaataaccctatggaacagagacctggcaccaacccctggagcaaacttgtatggcagccaccccttctaccttgccctggaggatggtggcagtgcacatggggtgttcctcctcaactccaatgccatggatgtggttctgcaaccctctcctgccctcagctggagaagcacaggaggcattctagatgtctacatcttcctgggccctgaaccaaagtctgtggtccaacaatacctggatgttgtgggatacccctttatgcccccttactggggattaggcttccacctgtgcagatggggttactcaagcacagcaattaccagacaggtggttgagaacatgaccagggctcacttccctttagatgtgcagtggaatgacctggactacatggacagcagaagggactttaccttcaacaaagatggattcagggacttccctgccatggtacaggagctacaccaaggaggcagaagatacatgatgattgttgacccagcaatttcttcctctggcccagcaggcagctacagaccctatgatgagggcctgagaagaggggtgttcatcacaaatgagacaggccaacctctgataggcaaagtgtggcctgggtccactgccttcccagacttcacaaaccccactgcactggcatggtgggaagacatggtggctgagttccatgaccaggtgccttttgatgggatgtggattgatatgaatgagccctctaactttatcagaggaagtgaggatggctgccccaacaatgaacttgagaaccctccttatgttcctggagtggtaggaggcactttgcaggcagccaccatctgtgccagctcacaccagttcctgtccactcactacaacctgcacaacctatatggacttacagaggccatagcttctcacagagccttagtgaaggccagaggcactaggccttttgtcatcagcaggtcaacctttgcaggccatggcagatatgctggccactggactggggatgtttggagttcttgggaacaactggccagctcagtgccagagatcctgcagtttaacctgctgggggtgcctctggtgggagctgatgtatgtggtttcctgggtaacacctctgaggagctctgtgtaagatggacccagttgggagctttctaccctttcatgagaaaccacaactctctcctcagcttgccccaggagccctacagcttttctgaaccagcccagcaggctatgaggaaggcactgacactgagatatgctctactgcctcacctctacaccctattccaccaagcccatgtggcaggtgaaacagtggccaggcccctgttcttagagttccctaaggactcaagtacctggacagttgaccaccagctgttgtggggtgaggccctgctcatcaccccagtactccaggctggaaaggcagaggttactggctacttccctctgggcacctggtatgacctgcagacagtccctgtggaggctctggggtcactgcctccccctccagctgctccaagagaacctgccatccacagtgaaggccaatgggtaaccttgcctgcccctttagacacaatcaatgtgcacttgagagcaggctatatcataccactgcaaggaccaggcctaacaactacagagagcagacagcaacctatggctctggcagttgctttgactaagggtggtgaagcaagaggggaactgttctgggatgatggagaatctctggaagtgttagagagaggagcatacactcaggtgatcttcttagccaggaacaacaccattgtgaatgaactggttagggtgacaagtgaaggtgcaggactgcagctgcagaaggtgactgtcttaggtgtagccacagctccacaacaagtgctgtccaatggtgttcctgtcagcaacttcacctactctcctgacaccaaggttctggacatctgtgtgagcctccttatgggtgagcagtttctagtctcttggtgc

SEQ ID NO: 330 - DNA, 2649 bp, synthetic construct
  misc_feature 1..2649: note = Synthetic
  source 1..2649: mol_type = other DNA
gcacatccaggcaggcccagagcagtgcccacacaatgtgatgtcccccctaattcaaggtttgattgtgcccctgacaaggccatcactcaggaacagtgtgaagctaggggctgttgctatatccctgcaaagcagggtctgcagggagctcagatggggcagccctggtgcttctttccacccagctaccccagctacaaactggagaatctgagctcatctgaaatgggctacactgccaccctgaccaggacaacccccaccttcttccccaaagacatattgactcttagacttgatgtgatgatggagactgaaaacaggttacatttcactattaaagatccagctaacaggaggtatgaggttcccttggagactccacatgttcacagcagggcaccttccccactttactctgtggagttcagtgaagagccctttggtgtgattgtgaggaggcagctggatggcagggtactgttgaacactactgtggctcccttgttctttgctgaccagttccttcagctgtccaccagcctgccctcccagtatatcacaggcttagctgagcacctcagtcccctgatgttgagcacatcatggaccaggattaccctttggaacagggatcttgctcccactcctggtgctaacctctatgggtctcaccctttctatctggctttggaggatggtgggagtgcacatggggtgttcctgctaaatagcaatgccatggatgtggtcctacagcctagccctgccctttcttggaggtctacaggtgggatattagatgtttacatttttctgggaccagaacctaagtcagtagtgcagcagtacctagatgttgtgggatatccttttatgcctccatactggggattaggctttcatctgtgcaggtggggctattcctcaactgctattaccaggcaggtggtggagaacatgaccagagcccattttcccttagatgtccagtggaatgatctggactatatggactccaggagggactttacattcaacaaggatggcttcagggattttcctgccatggtgcaggaactccaccagggtggtaggaggtatatgatgatagttgatcctgctatcagcagcagtggccctgctgggagctacaggccatatgatgagggtctgaggaggggtgttttcataacaaatgagactggccagcctcttattgggaaagtatggcctggttccactgccttccctgatttcaccaatcctacagccctggcctggtgggaggacatggtggctgagttccatgaccaggtgccttttgatggcatgtggattgacatgaatgaaccttccaacttcatcaggggctctgaggatggctgccctaacaatgagctggagaacccaccctatgtgcctggggtggttggggggacactccaggctgctactatatgtgcctccagccaccagtttctctctacacactacaatctgcacaacctctatggcctgactgaagcaattgcctcccacagggctctggtgaaggctagggggacaaggccatttgtgatatccagatccacctttgctggacatggcaggtatgcaggccactggactggggatgtgtggagctcctgggagcagttggcctctagtgtgccagaaattctgcagtttaatctgctgggggttcctctagtaggggctgatgtctgtggctttcttggcaacacctcagaggaactgtgtgtgaggtggactcagctgggggctttctacccctttatgagaaaccacaattcactgctcagtctgccccaggagccatattctttcagtgagcctgcccaacaagccatgaggaaggccctcaccctgaggtatgcacttctcccacacctctatacactgtttcatcaggcccatgttgctggggaaactgttgcaaggcccctcttcctggagttccccaaagactctagcacctggactgtggatcatcaactcctttggggtgaggccttactcatcaccccagtgctccaagctgggaaggcagaagtgactggctacttccccttgggcacatggtatgatttgcagactgtgccagtagaagcccttggcagccttccacccccacctgcagctcctagggagccagccatccatagtgagggtcagtgggtgactctgccagcccccctggacactatcaatgtccacctcagggctgggtacattatccctctgcaaggccctggcctcacaaccacagaatccagacagcaacccatggccctagctgttgccttgaccaagggtggggaagccaggggtgagctcttttgggatgatggagagagcctggaagtgctggagaggggggcctacacacaggtcattttcctagccagaaataacactattgtgaatgaattggtaagggtgaccagtgagggagctggcctgcagctgcagaaggtgactgtccttggtgtggctactgctccacagcaggtcctctccaatggtgtccctgtctcaaattttacctattctccagacaccaaggtcttggacatctgtgtatccctgttgatgggagagcagtttttggttagctggtgt

SEQ ID NO: 331 - DNA, 2649 bp, synthetic construct
  misc_feature 1..2649: note = Synthetic
  source 1..2649: mol_type = other DNA
gcacaccctggcagacctagagctgttcccacacagtgtgatgtccctcctaacagcagatttgactgtgccccagacaaagctatcacccaggagcagtgtgaggctaggggctgctgctacatccctgccaagcagggcctgcaaggagcccaaatgggccagccctggtgtttctttcccccctcttacccatcctacaagctagaaaacctcagctcatctgagatgggatacacagctaccctgaccagaaccacccccaccttcttccctaaggatatactgacattgagactggatgtgatgatggaaactgagaacagactccacttcaccatcaaggatcctgctaacagaaggtatgaggtgcccctggagacacctcatgtccacagtagagcccctagcccactatactctgtggagttctcagaagagccttttggtgtgatagttagaagacaactggatgggagagtgttgctaaatactactgttgctcccttattttttgctgaccagttcttgcagttatccacctctctcccctctcagtacatcacagggctggctgagcacctttcccctctgatgttgtccacttcttggacaagaatcaccttgtggaatagggaccttgccccaactcctggtgccaacctgtatggcagccaccccttctacctggccctggaggatggaggctctgcccatggagtgttcctgctgaactccaatgccatggatgttgtgctgcagccatctcctgccctgtcctggaggagtacaggaggcatcctggatgtgtatatctttctgggacctgagcccaagtctgtggttcagcagtacctggatgtagtgggctaccccttcatgccaccttactggggtctgggcttccacctctgcaggtggggttacagtagcactgctatcactagacaagtggtggagaacatgaccagggcccacttccctctagatgtgcagtggaatgacttagactatatggatagcagaagggacttcacattcaacaaggatggcttcagggacttccctgcaatggtacaggagttacaccaggggggaagaagatacatgatgattgtggaccctgccattagctcttctggccctgcagggagctacaggccttatgatgaagggctgagaaggggtgtgttcattactaatgaaacaggccagcctttaattggcaaggtctggcctggcagtacagccttcccagacttcaccaaccctactgctctagcttggtgggaggacatggtggctgaatttcatgatcaagtgccttttgatggcatgtggattgacatgaatgagcctagcaacttcattagaggcagtgaagatggttgccctaacaatgagctggaaaatccaccctatgttccaggtgtggtaggaggcaccctacaagcagccaccatttgtgcctctagccaccagttcctgagcacccactataacttacataacctgtatggcctcacagaagccattgccagccacagagccttagtgaaagcaaggggcacaagaccctttgtaatctcaaggtccacctttgctggccatggcagatatgcaggccactggacaggtgatgtgtggagctcctgggagcagttagcctcttctgtgccagaaatcctgcagttcaatctcctgggagtgcctctggtgggagctgatgtttgtggctttctgggtaacacaagtgaagagctgtgtgtcaggtggacacagctgggagcattttaccccttcatgaggaaccacaactctttgctcagtctgcctcaagaaccctactccttctctgagcctgcccagcaggctatgagaaaggccctcacccttagatatgctctcctgcctcacctgtacaccctgttccaccaggcccatgttgctggggagactgtggctagaccacttttcttagagttccctaaggacagcagtacctggacagtagaccaccaactgttatggggggaggccctgctcattacccctgttctccaggcaggcaaggcagaagtgacagggtacttccctctgggcacctggtatgacctacagacagttcctgtggaggcccttggcagtctgccaccccctcctgctgcacctagagaacctgcaatccactcagaaggacaatgggttaccctccctgcccctctagacaccatcaatgtgcatttaagagcaggctacatcatacccttgcagggccctggcctgaccaccacagaatctagacagcagcccatggcactggctgttgccctaaccaagggaggagaggccagaggagagctgttctgggatgatggggagagtctggaggtcctggagagaggagcctacacccaggtgatctttcttgctagaaacaatactatagtgaatgagctagtgagagtgactagtgagggtgctggcctccagttgcagaaggtaacagtattaggagtggctacagcccctcagcaggtactgtccaatggtgtgcctgtttccaatttcacttactcccctgacactaaggtactggatatctgtgtgtccctgctgatgggagaacagtttctggtcagctggtgc

SEQ ID NO: 332 - DNA, 2649 bp, synthetic construct
  misc_feature 1..2649: note = Synthetic
  source 1..2649: mol_type = other DNA
gcacatcctggaaggcccagagcagtgcccacacagtgtgatgtcccccccaattctagatttgattgtgcccctgataaggctatcacccaagaacagtgtgaggccagaggctgttgctacatacctgcaaagcaagggcttcagggagctcagatggggcaaccctggtgctttttcccacctagctatcccagctacaagctggaaaacttgagctcctctgaaatgggctacactgccactctgaccaggaccacccccaccttcttccccaaagacatactgactcttagactagatgttatgatggagactgaaaataggctccattttacaatcaaagatccagctaacaggaggtatgaggttcctttggagacccctcatgtccatagcagagcaccatcaccactctactctgtggagttttctgaggaaccctttggggtgattgtgaggaggcagctagatggcagggtgctgttaaatacaactgtggctcccctgttctttgctgaccagtttcttcaactgtccacctccctgccctcccagtatattacaggcctggctgagcacctcagtcccttgatgctcagcaccagctggaccaggataaccttatggaacagggaccttgctccaactcctggtgcaaacctctatgggtctcatcctttctatctagctcttgaggatggggggtctgcacatggggtgttcctgctaaactctaatgcaatggatgttgtcctgcagccaagccctgccctttcttggaggtccacaggtgggatcctggatgtctacatcttcttgggcccagaacccaagtctgtggtgcagcagtaccttgatgttgtgggatacccttttatgcccccatactggggcctgggctttcatctgtgcaggtggggctactcctccactgctatcaccaggcaggtggtggagaacatgaccagggcccacttccctctggatgtccagtggaatgatctggattatatggattccaggagggatttcactttcaacaaagatggctttagggacttccctgccatggtgcaggagctgcaccagggtggcaggaggtatatgatgattgtggatcctgccataagcagctcaggccctgctgggagctacaggccatatgatgaaggtttgaggaggggggttttcataaccaatgagactggccagcctctgattgggaaggtatggcctgggtccactgcattccctgacttcaccaatcccacagctctggcctggtgggaggacatggtagctgagttccatgaccaggtgccctttgatggaatgtggattgacatgaatgaaccttccaacttcatcaggggctctgaggatggctgccccaacaatgagctggaaaacccaccctatgtgcctggggtggttggtgggaccttgcaagctgccaccatctgtgcctcctctcaccagtttctctccacacattacaatctgcacaatctctatggcctgactgaagccattgcttcccacagagctctggtgaaggctaggggcacaaggccatttgttatatcaaggtccacatttgctggccatggcaggtatgctggccactggacaggggatgtatggagctcctgggagcagcttgcatcctctgtgccagaaattctgcagtttaacttattaggggtgcctctggttggtgctgatgtctgtggcttccttggcaacacatcagaggagctttgtgtgaggtggactcagttaggggctttctacccattcatgaggaatcacaactcactcctcagtctaccccaggagccctattcattctctgagccagcccagcaggccatgaggaaggctctcaccctgaggtatgcactcctccctcatttgtacacactgtttcaccaggcccatgttgctggggaaactgttgccaggcccctcttcctggaattccccaaagactctagcacttggactgtggatcatcagctcctgtggggggaagccctgctcattactccagtgctacaggctggtaaggctgaagtgactggctacttccctttgggcacatggtatgacctgcagacagtgccagtagaggcccttggcagcctcccacctccacctgcagctcccagggagccagccatccactctgaaggacagtgggtgactctgcctgcccccttagacactattaatgttcacctcagggctggctacatcattcccctgcaaggccctggcctcacaaccacagaatccaggcagcaacccatggctttggctgtggccctgactaagggtggggaagccaggggggagcttttttgggatgatggagagagcctagaagtgttggagaggggggcctatacacaggtcatctttttggccaggaataatacaattgtgaatgagctggtaagggtgaccagtgaaggagctggactgcagctgcagaaggtgactgtacttggagtggctactgctccacagcaggttctatcaaatggtgtccctgtttccaatttcacctacagcccagacacaaaggtcctggacatttgtgtctccctgttgatgggagagcaatttttggtaagctggtgt

SEQ ID NO: 333 - DNA, 2649 bp, synthetic construct
  misc_feature 1..2649: note = Synthetic
  source 1..2649: mol_type = other DNA
gcccaccctggcagacctagagctgtgccaactcagtgtgatgtccctcctaactctagatttgattgtgctccagacaaggccatcacccaggagcagtgtgaagctaggggctgctgctacatccctgccaagcaaggtctgcagggtgcccagatgggtcagccttggtgcttcttcccaccttcctacccctcatacaagctggaaaatctgagctcttctgagatgggctacacagccaccttgacaaggaccactccaacctttttccctaaagacatcctgacactgagacttgatgtgatgatggagactgagaacagactgcacttcactatcaaagacccagcaaacagaaggtatgaagtgcctctggagaccccccatgtgcacagcagagctccttcacctctgtactcagtggagttcagtgaggagccatttggggtgattgtgaggagacagctggatggcagggtactgctgaacaccacagtggcacccttgttctttgcagaccaattcctccagctcagtacaagcctgccttctcagtacattacaggactggcagagcacttaagcccattgatgttatccaccagctggaccagaattaccttgtggaacagggacctggcccctaccccaggagctaacctctatggcagccacccattttacctagccctggaggatgggggatcagcacatggggttttcctgctaaacagcaatgccatggatgtggtcctgcagccttctcctgccctgagctggaggtccacaggagggatccttgatgtgtacatctttctgggccctgagcctaagagtgtggtgcaacagtacttggatgtggtggggtaccctttcatgcctccctactgggggttgggcttccacttgtgcagatggggatacagctcaacagccatcaccaggcaggtggttgagaacatgactagagcccactttccactagatgtgcagtggaatgacctggactacatggatagtagaagagacttcaccttcaataaggatggcttcagagatttccctgccatggtgcaggaactgcaccagggaggcagaagatacatgatgatagtggaccctgctatcagcagctctggccctgcaggtagctacagaccttatgatgagggcctgaggaggggagtgttcatcaccaatgagacaggccagcccctcattggcaaggtctggccaggcagcacagctttccctgacttcaccaaccccacagccctggcctggtgggaggacatggtggctgagttccatgaccaggtaccctttgatgggatgtggattgacatgaatgaaccctctaacttcatcaggggttctgaagatggctgccctaacaatgagctggagaaccccccttatgtgccaggagttgtgggaggcacccttcaggctgccaccatctgtgccagttcccaccagttcctaagcacccactacaacctgcacaacctgtatggtctcactgaagccatagcctctcacagagctctagtgaaggccagagggaccaggccttttgttatctccaggagtacctttgctggccatggtagatatgcaggccactggacaggagatgtgtggtcctcctgggagcaattagccagcagtgtgccagagatcctgcagttcaacctgctgggggttcctttagttggggcagatgtgtgtggcttcttgggcaacacatctgaagagctgtgtgtgagatggacccagctgggagccttctacccattcatgagaaaccataactcactgctgagcctccctcaggagccctacagcttctcagaacctgcccagcaggctatgaggaaggccctgacactcaggtatgccctgttacctcacctgtacaccctgttccaccaggctcatgtagctggggagactgtggccagaccccttttccttgagtttcctaaggacagctccacctggactgtggaccaccagttgctgtggggagaggccctgctgatcacccctgttctgcaggctggcaaagctgaggtgacaggctacttccccctgggaacctggtatgacctacaaactgtgccagtggaagcactgggctcactacctccacctccagctgcccccagagaacctgctattcactctgaagggcagtgggtgacactgcctgccccattagacaccatcaatgtacacttaagggctggctacatcattccactgcaggggccaggcctgaccaccactgagtccaggcagcagcccatggccctggcagtagccctaaccaagggaggtgaggccagaggagagctgttttgggatgatggtgaaagcctagaggtactagagagaggagcctacacccaggtcatcttcctggccagaaacaacacaatagtgaatgagctggtcagggtcacatctgagggggcaggcctgcagcttcagaaggtcactgtgttgggggtagccacagctccacagcaggtactttccaatggagtgccagtcagcaacttcacctacagtcctgacacaaaggttctggacatctgtgtgagcctgctgatgggagagcagttcttggtcagctggtgc

SEQ ID NO: 334 - DNA, 363 bp, synthetic construct
  misc_feature 1..363: note = Synthetic
  source 1..363: mol_type = other DNA
gaggtgcagctggtggagtctgggggaggcttggtacagcctggggggtccctgagactctcctgtgcagcctctggattcgcctttagcagctatgccatgacctgggtccgacaggctccagggaaggggctggagtgggtctcagttatcagtggtactggtggtagtacatactacgcagactccgtgaagggccggttcaccatctccagagacaattccaagaacacgctgtatctacaaatgaacagcctgagagccgaggacacggccgtatattactgtgcgaaagggggagcagctcgtagaatggaatacttccagtactggggccagggcaccctggtcaccgtctcctca

SEQ ID NO: 335 - protein, 121 aa, synthetic construct
  REGION 1..121: note = Synthetic
EVQLVESGGGLVQPGGSLRLSCAASGFAFSSYAMTWVRQAPGKGLEWVSVISGTGGSTYYADSVKGRFTISRDNSKNTLYLQMNSLRAEDTAVYYCAKGGAARRMEYFQYWGQGTLVTVSS

SEQ ID NO: 336 - protein, 8 aa, synthetic construct
  REGION 1..8: note = Synthetic
GFAFSSYA

SEQ ID NO: 337 - protein, 8 aa, synthetic construct
  REGION 1..8: note = Synthetic
ISGTGGST

SEQ ID NO: 338 - protein, 14 aa, synthetic construct
  REGION 1..14: note = Synthetic
AKGGAARRMEYFQY

SEQ ID NO: 339 - DNA, 321 bp, synthetic construct
  misc_feature 1..321: note = Synthetic
  source 1..321: mol_type = other DNA
gacatccagatgacccagtctccatcctccctgtctgcatctgtaggagacagagtcaccatcacttgccgggcgagtcagggcattagcaattatttagcctggtatcagcagaaaccagggaaagttcctaacctccttatctatgctgcatccactttgcaatcaggggtcccatctcgattcagtggcagtggatctgggacagatttcactctcaccatcagcagcctgcagcctgaagatgttgcaacttattactgtcaaaagtataacagtgcccctctcactttcggcggagggaccaaggtggagatcaaa

SEQ ID NO: 340 - protein, 107 aa, synthetic construct
  REGION 1..107: note = Synthetic
DIQMTQSPSSLSASVGDRVTITCRASQGISNYLAWYQQKPGKVPNLLIYAASTLQSGVPSRFSGSGSGTDFTLTISSLQPEDVATYYCQKYNSAPLTFGGGTKVEIK

SEQ ID NO: 341 - protein, 6 aa, synthetic construct
  REGION 1..6: note = Synthetic
QGISNY

SEQ ID NO: 342 - skipped

SEQ ID NO: 343 - protein, 9 aa, synthetic construct
  REGION 1..9: note = Synthetic
QKYNSAPLT

SEQ ID NO: 344 - DNA, 363 bp, synthetic construct
  misc_feature 1..363: note = Synthetic
  source 1..363: mol_type = other DNA
gaggtgcagctggtggagtctgggggaggcttggtacagcctggggggtccctgagactctcctgtgcagcctctggattcacctttaacagctatgccatgacctgggtccgccaggctccagggaaggggctggagtgggtctcatttattggtggtagtactggtaacacatactacgcaggctccgtgaagggccggttcaccatctccagcgacaattccaagaagacgctgtatctgcaaatgaacagcctgagagccgaggacacggccgtatattactgtgcgaaagggggagcagctcgtagaatggaatacttccagcactggggccagggcaccctggtcaccgtctcctca

SEQ ID NO: 345 - protein, 121 aa, synthetic construct
  REGION 1..121: note = Synthetic
EVQLVESGGGLVQPGGSLRLSCAASGFTFNSYAMTWVRQAPGKGLEWVSFIGGSTGNTYYAGSVKGRFTISSDNSKKTLYLQMNSLRAEDTAVYYCAKGGAARRMEYFQHWGQGTLVTVSS

SEQ ID NO: 346 - protein, 8 aa, synthetic construct
  REGION 1..8: note = Synthetic
GFTFNSYA

SEQ ID NO: 347 - protein, 8 aa, synthetic construct
  REGION 1..8: note = Synthetic
IGGSTGNT

SEQ ID NO: 348 - protein, 14 aa, synthetic construct
  REGION 1..14: note = Synthetic
AKGGAARRMEYFQH

SEQ ID NO: 349 - DNA, 321 bp, synthetic construct
  misc_feature 1..321: note = Synthetic
  source 1..321: mol_type = other DNA
gacatccagatgacccagtctccatcctccctgtctgcatctataggagacagagtcaccatcacttgccgggcgagtcagggcattagcaattatttagcctggtatcaacagaaaccagggaaagttcctaagctcctgatctatgctgcatccactttgcaatcaggggtcccatctcggttcagtggcagtggatctgggacagatttcactctcaccatcagcagcctgcagcctgaagatgttgcaacttattactgtcaaaaccataacagtgtccctctcactttcggcggagggaccaaggtggagatcaaa

SEQ ID NO: 350 - protein, 107 aa, synthetic construct
  REGION 1..107: note = Synthetic
DIQMTQSPSSLSASIGDRVTITCRASQGISNYLAWYQQKPGKVPKLLIYAASTLQSGVPSRFSGSGSGTDFTLTISSLQPEDVATYYCQNHNSVPLTFGGGTKVEIK

SEQ ID NO: 351 - protein, 6 aa, synthetic construct
  REGION 1..6: note = Synthetic
QGISNY

SEQ ID NO: 352 - skipped

SEQ ID NO: 353 - protein, 9 aa, synthetic construct
  REGION 1..9: note = Synthetic
QNHNSVPLT

SEQ ID NO: 354 - DNA, 366 bp, synthetic construct
  misc_feature 1..366: note = Synthetic
  source 1..366: mol_type = other DNA
caggtgcagctggtggagtctgggggaggcgtggtccagcctgggaggtccctgagactctcctgtgcagcgtctggattcaccttcactacctatggcatgcactgggtccgccaggctccaggcaaggggctggagtgggtggctgttatatggtatgatggaagtaataaatattatggagactccgtgaagggccgattcaccatctccagagacaattccaagaacacactgtatctgcaaatgaacagcctgagagtcgacgacacggctgtttattactgtacgagaacccatggctataccaggtcgtcggacggttttgactactggggccagggaaccctggtcaccgtctcctca

SEQ ID NO: 355 - protein, 122 aa, synthetic construct
  REGION 1..122: note = Synthetic
QVQLVESGGGVVQPGRSLRLSCAASGFTFTTYGMHWVRQAPGKGLEWVAVIWYDGSNKYYGDSVKGRFTISRDNSKNTLYLQMNSLRVDDTAVYYCTRTHGYTRSSDGFDYWGQGTLVTVSS

SEQ ID NO: 356 - protein, 8 aa, synthetic construct
  REGION 1..8: note = Synthetic
GFTFTTYG

SEQ ID NO: 357 - protein, 8 aa, synthetic construct
  REGION 1..8: note = Synthetic
IWYDGSNK

SEQ ID NO: 358 - protein, 15 aa, synthetic construct
  REGION 1..15: note = Synthetic
TRTHGYTRSSDGFDY

SEQ ID NO: 359 - DNA, 321 bp, synthetic construct
  misc_feature 1..321: note = Synthetic
  source 1..321: mol_type = other DNA
gacatccagatgacccagtctccatcctccctgtctgcatctgtaggagacagagtcaccatcacttgccgggcaagtcagagcattagaaatgttttaggctggtttcagcagaaaccagggaaagcccctcagcgcctgatctatgctgcatccagtttgcaaagtggggtcccatcaaggttcagcggcagtggatctgggacagaattcactctcacaatcagcagcctacagcctgaagattttgcaacttattactgtctacagcataatttttacccgctcactttcggcggagggaccaaggtggagatcaaa

SEQ ID NO: 360 - protein, 107 aa, synthetic construct
  REGION 1..107: note = Synthetic
DIQMTQSPSSLSASVGDRVTITCRASQSIRNVLGWFQQKPGKAPQRLIYAASSLQSGVPSRFSGSGSGTEFTLTISSLQPEDFATYYCLQHNFYPLTFGGGTKVEIK

SEQ ID NO: 361 - protein, 6 aa, synthetic construct
  REGION 1..6: note = Synthetic
QSIRNV

SEQ ID NO: 362 - skipped

SEQ ID NO: 363 - protein, 9 aa, synthetic construct
  REGION 1..9: note = Synthetic
LQHNFYPLT

SEQ ID NO: 364 - DNA, 369 bp, synthetic construct
  misc_feature 1..369: note = Synthetic
  source 1..369: mol_type = other DNA
gaagtgcagctggtggagtctgggggaggcttggtacagcctggcaggtccctgagactctcctgtgcagcctctggattcacctttgatgataaagccatgcactgggtccggcaagttccagggaagggcctggaatggatctcaggtattagttggaatagtggtactataggctatgcggactctgtgaagggccgattcatcatctccagagacaacgccaagaactccctgtatctacaaatgaacagtctgagagctgaggacacggccttgtattactgcgcaaaagatggagataccagtggctggtactggtacggtttggacgtctggggccaagggaccacggtcaccgtctcctca

SEQ ID NO: 365 - protein, 123 aa, synthetic construct
  REGION 1..123: note = Synthetic
EVQLVESGGGLVQPGRSLRLSCAASGFTFDDKAMHWVRQVPGKGLEWISGISWNSGTIGYADSVKGRFIISRDNAKNSLYLQMNSLRAEDTALYYCAKDGDTSGWYWYGLDVWGQGTTVTVSS

SEQ ID NO: 366 - protein, 8 aa, synthetic construct
  REGION 1..8: note = Synthetic
GFTFDDKA

SEQ ID NO: 367 - protein, 8 aa, synthetic construct
  REGION 1..8: note = Synthetic
ISWNSGTI

SEQ ID NO: 368 - protein, 16 aa, synthetic construct
  REGION 1..16: note = Synthetic
AKDGDTSGWYWYGLDV

SEQ ID NO: 369 - DNA, 321 bp, synthetic construct
  misc_feature 1..321: note = Synthetic
  source 1..321: mol_type = other DNA
gaaattgtgttgacacagtctcctgccaccctgtctttgtctccaggggaaagagccaccctctcctgcagggccagtcagagtgttagcagctacttagcctggtaccaacagaaacctggccaggctcccaggctcctcatccatgatgtatccaacagggccactggcatcccagccaggttcagtggcagtgggtctgggacagacttcactctcaccatcagcagtctagagcctgaagattttgtagtttattactgtcagcagcgtagcgactggcccatcaccttcggccaagggacacgactggagattaaa

SEQ ID NO: 370 - protein, 107 aa, synthetic construct
  REGION 1..107: note = Synthetic
EIVLTQSPATLSLSPGERATLSCRASQSVSSYLAWYQQKPGQAPRLLIHDVSNRATGIPARFSGSGSGTDFTLTISSLEPEDFVVYYCQQRSDWPITFGQGTRLEIK

SEQ ID NO: 371 - protein, 6 aa, synthetic construct
  REGION 1..6: note = Synthetic
QSVSSY

SEQ ID NO: 372 - skipped

SEQ ID NO: 373 - protein, 9 aa, synthetic construct
  REGION 1..9: note = Synthetic
QQRSDWPIT

SEQ ID NO: 374 - DNA, 360 bp, synthetic construct
  misc_feature 1..360: note = Synthetic
  source 1..360: mol_type = other DNA
caggtgcagctggtggagtctgggggaggcgtggtccagcctgggaggtccctgagactctcctgtatagcctctggattcaccttcagtgtctatggcattcactgggtccgccaggctccaggcaaggggctggagtggatggcagtaatatcacatgatggaaatattaaacactatgcagactccgtgaagggccgattcaccatctccagagacaattccaagaacacgctgtatcttcaaattaacagcctgagaactgaggacacggctgtgtattactgtgcgaaagatacctggaactcccttgatacttttgatatctggggccaagggacaatggtcaccgtctcttca

SEQ ID NO: 375 - protein, 120 aa, synthetic construct
  REGION 1..120: note = Synthetic
QVQLVESGGGVVQPGRSLRLSCIASGFTFSVYGIHWVRQAPGKGLEWMAVISHDGNIKHYADSVKGRFTISRDNSKNTLYLQINSLRTEDTAVYYCAKDTWNSLDTFDIWGQGTMVTVSS

SEQ ID NO: 376 - protein, 8 aa, synthetic construct
  REGION 1..8: note = Synthetic
GFTFSVYG

SEQ ID NO: 377 - protein, 8 aa, synthetic construct
  REGION 1..8: note = Synthetic
ISHDGNIK

SEQ ID NO: 378 - protein, 13 aa, synthetic construct
  REGION 1..13: note = Synthetic
AKDTWNSLDTFDI

SEQ ID NO: 379 - DNA, 321 bp, synthetic construct
  misc_feature 1..321: note = Synthetic
  source 1..321: mol_type = other DNA
gacatccagttgacccagtctccatcctccctgtctgcatctgtaggagacagagtcaccatcacttgctgggccagtcagggcattagcagttatttagcctggtatcagcaaaaaccagggaaagcccctaagctcctgatctatgctgcatccactttgcaaagtggggtcccatcaaggttcagcggcagtggatctgggacagaattcactctcacaatcagcagcctgcagcctgaagattttgcaacttattactgtcaacagcttaatagttaccctctcactttcggcggagggaccaaggtggagatcaaa

SEQ ID NO: 380 - protein, 107 aa, synthetic construct
  REGION 1..107: note = Synthetic
DIQLTQSPSSLSASVGDRVTITCWASQGISSYLAWYQQKPGKAPKLLIYAASTLQSGVPSRFSGSGSGTEFTLTISSLQPEDFATYYCQQLNSYPLTFGGGTKVEIK

SEQ ID NO: 381 - protein, 6 aa, synthetic construct
  REGION 1..6: note = Synthetic
QGISSY

SEQ ID NO: 382 - skipped

SEQ ID NO: 383 - protein, 9 aa, synthetic construct
  REGION 1..9: note = Synthetic
QQLNSYPLT

SEQ ID NO: 384 - DNA, 360 bp, synthetic construct
  misc_feature 1..360: note = Synthetic
  source 1..360: mol_type = other DNA
caggtcaccttgagggagtctggtcccgcgctggtgaaaccctcacagaccctcacactgacctgcaccttctctggattctcactcaacacttatgggatgtttgtgagctggatccgtcagcctccagggaaggccctagagtggcttgcacacattcattgggatgatgataaatactacagcacatctctgaagaccaggctcaccatctccaaggacacctccaaaaaccaggtggtccttacaatgaccaacatggaccctgtggacacagccacgtattattgtgcacgggggcacaataatttgaactacatcatccactggggccagggaaccctggtcaccgtctcctca

SEQ ID NO: 385 - protein, 120 aa, synthetic construct
  REGION 1..120: note = Synthetic
QVTLRESGPALVKPSQTLTLTCTFSGFSLNTYGMFVSWIRQPPGKALEWLAHIHWDDDKYYSTSLKTRLTISKDTSKNQVVLTMTNMDPVDTATYYCARGHNNLNYIIHWGQGTLVTVSS

SEQ ID NO: 386 - protein, 10 aa, synthetic construct
  REGION 1..10: note = Synthetic
GFSLNTYGMF

SEQ ID NO: 387 - protein, 7 aa, synthetic construct
  REGION 1..7: note = Synthetic
IHWDDDK

SEQ ID NO: 388 - protein, 12 aa, synthetic construct
  REGION 1..12: note = Synthetic
ARGHNNLNYIIH

SEQ ID NO: 389 - DNA, 321 bp, synthetic construct
  misc_feature 1..321: note = Synthetic
  source 1..321: mol_type = other DNA
gccatccagatgacccagtctccatcctccctgtctgcatctgtaggagacagagtcaccatcacttgccgggcaagtcagggcattagaaatgatttaggctggtatcagcagaaaccagggaaagcccctaagctcctgatctatgctgcatccactttacaaagtggggtcccatcaaggttcagcggcagtggatctggcacagatttcactctcaccatcagcagcctgcagcctgaagattttgcaacttattactgtctacaagattacaattacccattcactttcggccctgggaccaaagtggatatcaaa

SEQ ID NO: 390 - protein, 107 aa, synthetic construct
  REGION 1..107: note = Synthetic
AIQMTQSPSSLSASVGDRVTITCRASQGIRNDLGWYQQKPGKAPKLLIYAASTLQSGVPSRFSGSGSGTDFTLTISSLQPEDFATYYCLQDYNYPFTFGPGTKVDIK

SEQ ID NO: 391 - protein, 6 aa, synthetic construct
  REGION 1..6: note = Synthetic
QGIRND

SEQ ID NO: 392 - skipped

SEQ ID NO: 393 - protein, 9 aa, synthetic construct
  REGION 1..9: note = Synthetic
LQDYNYPFT

SEQ ID NO: 394 - DNA, 348 bp, synthetic construct
  misc_feature 1..348: note = Synthetic
  source 1..348: mol_type = other DNA
gaggtgcagctggtggagtctgggggaggcttggtacagcctggagggtccctgagactctcctgtgcagtctctggattcatcttcagtagttatgaaatgaactgggtccgccaggctccagggaaggggctggagtgggtttcatacattagtagtagtggtagtaccatattctacgcagactctgtgaagggccgattcaccatctccagagacaacgccaagaactcactgtatctgcaaatgaacagcctgagagccgaggacacggctgtttattactgtgtgtctggagtggtcctttttgatgtctggggccaagggacaatggtcaccgtctcttca

SEQ ID NO: 395 - protein, 116 aa, synthetic construct
  REGION 1..116: note = Synthetic
EVQLVESGGGLVQPGGSLRLSCAVSGFIFSSYEMNWVRQAPGKGLEWVSYISSSGSTIFYADSVKGRFTISRDNAKNSLYLQMNSLRAEDTAVYYCVSGVVLFDVWGQGTMVTVSS

SEQ ID NO: 396 - protein, 8 aa, synthetic construct
  REGION 1..8: note = Synthetic
GFIFSSYE

SEQ ID NO: 397 - protein, 8 aa, synthetic construct
  REGION 1..8: note = Synthetic
ISSSGSTI

SEQ ID NO: 398 - protein, 9 aa, synthetic construct
  REGION 1..9: note = Synthetic
VSGVVLFDV

SEQ ID NO: 399 - DNA, 321 bp, synthetic construct
  misc_feature 1..321: note = Synthetic
  source 1..321: mol_type = other DNA
gaaatagtgatgacgcagtctccagccaccctgtctgtgtctccgggggaaagagccaccctctcctgcagggccagtcagagtgttagcagcaactttgcctggtaccaacagaaacctggccaggctcccaggctcctcatctatagtgcatcctccagggccactggtatcccagtcaggttcagtggcagtgggtctgggacagagttcactctcaccatcagcagcctgcagtctgaagattttgcagtttattactgtcagcagtataatatctggcctcggacgttcggccaagggaccaaggtggaaatcaaa

SEQ ID NO: 400 - protein, 107 aa, synthetic construct
  REGION 1..107: note = Synthetic
EIVMTQSPATLSVSPGERATLSCRASQSVSSNFAWYQQKPGQAPRLLIYSASSRATGIPVRFSGSGSGTEFTLTISSLQSEDFAVYYCQQYNIWPRTFGQGTKVEIK

SEQ ID NO: 401 - protein, 6 aa, synthetic construct
  REGION 1..6: note = Synthetic
QSVSSN

SEQ ID NO: 402 - skipped

SEQ ID NO: 403 - protein, 9 aa, synthetic construct
  REGION 1..9: note = Synthetic
QQYNIWPRT

SEQ ID NO: 404 - DNA, 375 bp, synthetic construct
  misc_feature 1..375: note = Synthetic
  source 1..375: mol_type = other DNA
gaggtgcagctggtggagtctgggggaggcttggtccagcctggggggtccctgagactctcctgtgcagcctctggattcacctttagtaactattggatgacctgggtccgccaggctccagggaaggggctggagtgggtggccaacataaaggaagatggaagtgagaaagactatgtggactctgtgaagggccgattcaccatctccagagacaacgccaagaactcactgtatctgcaaatgaacagcctgagaggcgaggacacggctgtgtattactgtgcgagagatggggagcagctcgtcgattactactactactacgttatggacgtctggggccaagggaccacggtcaccgtctcctca

SEQ ID NO: 405 - protein, 125 aa, synthetic construct
  REGION 1..125: note = Synthetic
EVQLVESGGGLVQPGGSLRLSCAASGFTFSNYWMTWVRQAPGKGLEWVANIKEDGSEKDYVDSVKGRFTISRDNAKNSLYLQMNSLRGEDTAVYYCARDGEQLVDYYYYYVMDVWGQGTTVTVSS

SEQ ID NO: 406 - protein, 8 aa, synthetic construct
  REGION 1..8: note = Synthetic
GFTFSNYW

SEQ ID NO: 407 - protein, 8 aa, synthetic construct
  REGION 1..8: note = Synthetic
IKEDGSEK

SEQ ID NO: 408 - protein, 18 aa, synthetic construct
  REGION 1..18: note = Synthetic
ARDGEQLVDYYYYYVMDV

SEQ ID NO: 409 - DNA, 321 bp, synthetic construct
  misc_feature 1..321: note = Synthetic
  source 1..321: mol_type = other DNA
gacatccagatgacccagtctccatcttccgtgtctgcatctgtaggagacagagtcaccatcacttgtcgggcgagtcagggtattagcagctggttagcctggtatcagcagaaaccagggaaagcccctaagctcctgatctatgctgcatccagtttgcaaagtggggtcccatcaaggttcagcggcagtggatctgggacagatttcactctcaccatcagcagcctgcagcctgaagattttgcaacttactattgtcaaaaggctaacagtttcccgtacacttttggccaggggaccaagctggagatcaaa

SEQ ID NO: 410 - protein, 107 aa, synthetic construct
  REGION 1..107: note = Synthetic
DIQMTQSPSSVSASVGDRVTITCRASQGISSWLAWYQQKPGKAPKLLIYAASSLQSGVPSRFSGSGSGTDFTLTISSLQPEDFATYYCQKANSFPYTFGQGTKLEIK

SEQ ID NO: 411 - protein, 6 aa, synthetic construct
  REGION 1..6: note = Synthetic
QGISSW

SEQ ID NO: 412 - skipped

SEQ ID NO: 413 - protein, 9 aa, synthetic construct
  REGION 1..9: note = Synthetic
QKANSFPYT

SEQ ID NO: 414 - DNA, 381 bp, synthetic construct
  misc_feature 1..381: note = Synthetic
  source 1..381: mol_type = other DNA
gaagtgcagctggtggagtctgggggaggcttggtacagcctggcaggtccctgagactctcctgtgcagcctctggattcacctttgatgactatgccatgcactgggtccggcaagctccagggaagggcctggagtgggtctcaggtattagttggaatagtggttacataggctatgcggactctgtgaagggccgattcaccatctccagagacaacgccgagaactccctacatctgcaaatgaacagtctgagagctgaggacacggccttgtattactgtgcaagagggggatctactctggttcggggagttaagggaggctactacggtatggacgtctggggccaagggaccacggtcaccgtctcctca

SEQ ID NO: 415 - protein, 127 aa, synthetic construct
  REGION 1..127: note = Synthetic
EVQLVESGGGLVQPGRSLRLSCAASGFTFDDYAMHWVRQAPGKGLEWVSGISWNSGYIGYADSVKGRFTISRDNAENSLHLQMNSLRAEDTALYYCARGGSTLVRGVKGGYYGMDVWGQGTTVTVSS

SEQ ID NO: 416 - protein, 8 aa, synthetic construct
  REGION 1..8: note = Synthetic
GFTFDDYA

SEQ ID NO: 417 - protein, 8 aa, synthetic construct
  REGION 1..8: note = Synthetic
ISWNSGYI

SEQ ID NO: 418 - protein, 20 aa, synthetic construct
  REGION 1..20: note = Synthetic
ARGGSTLVRGVKGGYYGMDV

SEQ ID NO: 419 - DNA, 321 bp, synthetic construct
  misc_feature 1..321: note = Synthetic
  source 1..321: mol_type = other DNA
gacatccagatgacccagtctccatcctccctgtctgcatctgtaggagacagagtcaccatcacttgccgggcaagtcagagcataagtagctatttaaattggtatcagcagaaaccaggtaaagcccctaaggtcctgatctatgctgcatccagtttgcaaagtggggtcccatcaaggttcagtggcagtggatctgggacagatttcactctcaccatcagcagtctgcaacctgaagattttgcaacttactactgtcaacagagttacagtattccgctcactttcggcggagggaccaaggtggagatcaaa

SEQ ID NO: 420 - protein, 107 aa, synthetic construct
  REGION 1..107: note = Synthetic
DIQMTQSPSSLSASVGDRVTITCRASQSISSYLNWYQQKPGKAPKVLIYAASSLQSGVPSRFSGSGSGTDFTLTISSLQPEDFATYYCQQSYSIPLTFGGGTKVEIK

SEQ ID NO: 421 - protein, 6 aa, synthetic construct
  REGION 1..6: note = Synthetic
QSISSY

SEQ ID NO: 422 - skipped

SEQ ID NO: 423 - protein, 9 aa, synthetic construct
  REGION 1..9: note = Synthetic
QQSYSIPLT

SEQ ID NO: 424 - DNA, 351 bp, synthetic construct
  misc_feature 1..351: note = Synthetic
  source 1..351: mol_type = other DNA
caggtgcagctggtggagtctgggggaggcgtggtccagcctgggaggtccctgagactctcctgtgcagcgtctggattcaccttcagtagctatggcatgcactgggtccgccaggctccaggcaaggggctggagtgggtggcagttatatggtatgatggaagtaataaatactatgcagactccgtgaagggccgattcaccatctccagagacatttccaagaacacgctgtatctgcaaatgaacagcctgagagccgaggacacggccgtatattactgtgcgggtcaactggatctcttctttgactactggggccagggaaccctggtcaccgtctcctca

SEQ ID NO: 425 - protein, 117 aa, synthetic construct
  REGION 1..117: note = Synthetic
QVQLVESGGGVVQPGRSLRLSCAASGFTFSSYGMHWVRQAPGKGLEWVAVIWYDGSNKYYADSVKGRFTISRDISKNTLYLQMNSLRAEDTAVYYCAGQLDLFFDYWGQGTLVTVSS

SEQ ID NO: 426 - protein, 8 aa, synthetic construct
  REGION 1..8: note = Synthetic
GFTFSSYG

SEQ ID NO: 427 - protein, 8 aa, synthetic construct
  REGION 1..8: note = Synthetic
IWYDGSNK

SEQ ID NO: 428 - protein, 10 aa, synthetic construct
  REGION 1..10: note = Synthetic
AGQLDLFFDY

SEQ ID NO: 429 - DNA, 321 bp, synthetic construct
  misc_feature 1..321: note = Synthetic
  source 1..321: mol_type = other DNA
gacatccagatgacccagtctccatcctccctgtctgcatctgtaggagacagagtcaccatcacttgccgggcaagtcagagcattgacaggtatttaaattggtatcggcagaaaccagggaaagcccctaagctcctgatctatactacatccagtttgcaaagtggggtcccatcaaggttcagtggcagtggatctgggacagatttcactctcaccctcagcagtctgcagcctgaagattttgcaacttactactgtcagcagagttacagtcccccgctcactttcggcggagggaccaaggtggagatcaaa

SEQ ID NO: 430 - protein, 107 aa, synthetic construct
  REGION 1..107: note = Synthetic
DIQMTQSPSSLSASVGDRVTITCRASQSIDRYLNWYRQKPGKAPKLLIYTTSSLQSGVPSRFSGSGSGTDFTLTLSSLQPEDFATYYCQQSYSPPLTFGGGTKVEIK

SEQ ID NO: 431 - protein, 6 aa, synthetic construct
  REGION 1..6: note = Synthetic
QSIDRY

SEQ ID NO: 432 - skipped

SEQ ID NO: 433 - protein, 9 aa, synthetic construct
  REGION 1..9: note = Synthetic
QQSYSPPLT

SEQ ID NO: 434 - DNA, 375 bp, synthetic construct
  misc_feature 1..375: note = Synthetic
  source 1..375: mol_type = other DNA
gaggtgcagctggtggagtctgggggaggcttggtccagcctggggggtccctgagactctcctgtacagcctctggattcacctttagtaactattggatgacctgggtccgccaggctccagggaaggggctggagtgggtggccaacataaaggaagatggaagtgagaaagagtatgtggactctgtgaagggccggttcaccatctccagagacaacgccaagaattcactgtatctgcaaatgaacagcctgagaggcgaggacacggctgtatattactgtgcgagagatggggagcagctcgtcgattactattactactacgttatggacgtctggggccaagggaccacggtcaccgtctcctca

SEQ ID NO: 435 - protein, 125 aa, synthetic construct
  REGION 1..125: note = Synthetic
EVQLVESGGGLVQPGGSLRLSCTASGFTFSNYWMTWVRQAPGKGLEWVANIKEDGSEKEYVDSVKGRFTISRDNAKNSLYLQMNSLRGEDTAVYYCARDGEQLVDYYYYYVMDVWGQGTTVTVSS

SEQ ID NO: 436 - protein, 8 aa, synthetic construct
  REGION 1..8: note = Synthetic
GFTFSNYW

SEQ ID NO: 437 - protein, 8 aa, synthetic construct
  REGION 1..8: note = Synthetic
IKEDGSEK

SEQ ID NO: 438 - protein, 18 aa, synthetic construct
  REGION 1..18: note = Synthetic
ARDGEQLVDYYYYYVMDV

SEQ ID NO: 439 - DNA, 321 bp, synthetic construct
  misc_feature 1..321: note = Synthetic
  source 1..321: mol_type = other DNA
gacatccagatgacccagtctccatcttccgtgtctgcatctgttggagacagagtcaccatcacttgtcgggcgagtcagggtattagcagctggttagcctggtatcagcagaaaccagggaaagcccctaagctcctgatctatgctgcatccagtttgcaaagtggggtcccatcaaggttcagcggcagtggatctgggacagatttcactctcaccatcagcagcctgcagcctgaagattttgcaacttactattgtcaaaaggctgacagtctcccgtacgcttttggccaggggaccaagctggagatcaaa

SEQ ID NO: 440 - protein, 107 aa, synthetic construct
  REGION 1..107: note = Synthetic
DIQMTQSPSSVSASVGDRVTITCRASQGISSWLAWYQQKPGKAPKLLIYAASSLQSGVPSRFSGSGSGTDFTLTISSLQPEDFATYYCQKADSLPYAFGQGTKLEIK

SEQ ID NO: 441 - protein, 6 aa, synthetic construct
  REGION 1..6: note = Synthetic
QGISSW

SEQ ID NO: 442 - skipped

SEQ ID NO: 443 - protein, 9 aa, synthetic construct
  REGION 1..9: note = Synthetic
QKADSLPYA

SEQ ID NO: 444 - DNA, 363 bp, synthetic construct
  misc_feature 1..363: note = Synthetic
  source 1..363: mol_type = other DNA
gaggtgcagctggtggagtctgggggaggcttggttcagcctggggggtccctgagactctcctgtgcaacctctggattcacctttaccagctatgacatgaagtgggtccgccaggctccagggctgggcctggagtgggtctcagctattagtggtagtggtggtaacacatactacgcagactccgtgaagggccggttcaccatctccagagacaattccaggaacacgctgtatctgcaaatgaacagcctgagagccgaggacacggccgtatattactgtacgaggtcccatgacttcggtgccttcgactactttgactactggggccagggaaccctggtcaccgtctcctca

SEQ ID NO: 445 - protein, 121 aa, synthetic construct
  REGION 1..121: note = Synthetic
EVQLVESGGGLVQPGGSLRLSCATSGFTFTSYDMKWVRQAPGLGLEWVSAISGSGGNTYYADSVKGRFTISRDNSRNTLYLQMNSLRAEDTAVYYCTRSHDFGAFDYFDYWGQGTLVTVSS

SEQ ID NO: 446 - protein, 8 aa, synthetic construct
  REGION 1..8: note = Synthetic
GFTFTSYD

SEQ ID NO: 447 - protein, 8 aa, synthetic construct
  REGION 1..8: note = Synthetic
ISGSGGNT

SEQ ID NO: 448 - protein, 14 aa, synthetic construct
  REGION 1..14: note = Synthetic
TRSHDFGAFDYFDY

SEQ ID NO: 449 - DNA, 321 bp, synthetic construct
  misc_feature 1..321: note = Synthetic
  source 1..321: mol_type = other DNA
gacatccagatgacccagtctccatcctccctgtctgcatctgtgggagacagagtcaccatcacttgccgggcaagtcagggcattagagatcattttggctggtatcagcagaaaccagggaaagcccctaagcgcctgatctatgctgcatccagtttgcacagtggggtcccatcaaggttcagcggcagtggatctgggacagaattcactctcacaatcagcagcttgcagcctgaagattttgcaacctattactgtctacagtatgatacttacccgctcactttcggcggagggaccaaggtggagatcaaa

SEQ ID NO: 450 - protein, 107 aa, synthetic construct
  REGION 1..107: note = Synthetic
DIQMTQSPSSLSASVGDRVTITCRASQGIRDHFGWYQQKPGKAPKRLIYAASSLHSGVPSRFSGSGSGTEFTLTISSLQPEDFATYYCLQYDTYPLTFGGGTKVEIK

SEQ ID NO: 451 - protein, 6 aa, synthetic construct
  REGION 1..6: note = Synthetic
QGIRDH

SEQ ID NO: 452 - skipped

SEQ ID NO: 453 - protein, 9 aa, synthetic construct
  REGION 1..9: note = Synthetic
LQYDTYPLT

SEQ ID NO: 454 - DNA, 366 bp, synthetic construct
  misc_feature 1..366: note = Synthetic
  source 1..366: mol_type = other DNA
gaagtgcagctggtggagtctgggggagacttggtacagcctggcaggtccctgagactctcctgtgcagcctctggattcacctttgatgattatgccatgcactgggtccggcaagctccagggaagggcctggagtgggtctcaggtattagttggaatagtgctaccagagtctatgcggactctgtgaagggccgattcaccatctccagagacaacgccaagaatttcctgtatctgcaaatgaacagtctgagatctgaggacacggccttgtatcactgtgcaaaagatatggatatctcgctagggtactacggtttggacgtctggggccaagggaccacggtcaccgtctcctca

SEQ ID NO: 455 - protein, 122 aa, synthetic construct
  REGION 1..122: note = Synthetic
EVQLVESGGDLVQPGRSLRLSCAASGFTFDDYAMHWVRQAPGKGLEWVSGISWNSATRVYADSVKGRFTISRDNAKNFLYLQMNSLRSEDTALYHCAKDMDISLGYYGLDVWGQGTTVTVSS

SEQ ID NO: 456 - protein, 8 aa, synthetic construct
  REGION 1..8: note = Synthetic
GFTFDDYA

SEQ ID NO: 457 - protein, 8 aa, synthetic construct
  REGION 1..8: note = Synthetic
ISWNSATR

SEQ ID NO: 458 - protein, 15 aa, synthetic construct
  REGION 1..15: note = Synthetic
AKDMDISLGYYGLDV

SEQ ID NO: 459 - DNA, 324 bp, synthetic construct
  misc_feature 1..324: note = Synthetic
  source 1..324: mol_type = other DNA
gaaatagtgatgacgcagtctccagccaccctgtctgtgtctccaggggaaagagccaccctctcctgcagggccagtcagactgttagcagcaacttagcctggtatcagcagaaacctggccaggctcccaggctcctcatctatggttcatcctccagggccactggtatcccagccaggttcagtggcagtgggtctgggacagagttcactctcaccatcagcagcctgcagtctgaagattttgcagtttattactgtcagcagtataataactggcctccctacacttttggccaggggaccaagctggagatcaaa

SEQ ID NO: 460 - protein, 108 aa, synthetic construct
  REGION 1..108: note = Synthetic
EIVMTQSPATLSVSPGERATLSCRASQTVSSNLAWYQQKPGQAPRLLIYGSSSRATGIPARFSGSGSGTEFTLTISSLQSEDFAVYYCQQYNNWPPYTFGQGTKLEIK

SEQ ID NO: 461 - protein, 6 aa, synthetic construct
  REGION 1..6: note = Synthetic
QTVSSN

SEQ ID NO: 462 - skipped

SEQ ID NO: 463 - protein, 10 aa, synthetic construct
  REGION 1..10: note = Synthetic
QQYNNWPPYT

SEQ ID NO: 464 - DNA, 372 bp, synthetic construct
  misc_feature 1..372: note = Synthetic
  source 1..372: mol_type = other DNA
cagatcaccttgaaggagtctggtcctacgctggtgaaacccacacagaccctcacgctgacctgcaccttctctgggttctcactcagcactagtggagtgggtgtggtctggatccgtcagccccccggaaaggccctggagtggcttgcactcatttattggaatgatcataagcggtacagcccatctctggggagcaggctcaccatcaccaaggacacctccaaaaaccaggtggtccttacaatgaccaacatggaccctgtggacacagccacatattactgtgcacactacagtgggagctattcctactactactatggtttggacgtctggggccaagggaccacggtcaccgtctcctca

SEQ ID NO: 465 - protein, 124 aa, synthetic construct
  REGION 1..124: note = Synthetic
QITLKESGPTLVKPTQTLTLTCTFSGFSLSTSGVGVVWIRQPPGKALEWLALIYWNDHKRYSPSLGSRLTITKDTSKNQVVLTMTNMDPVDTATYYCAHYSGSYSYYYYGLDVWGQGTTVTVSS

SEQ ID NO: 466 - protein, 10 aa, synthetic construct
  REGION 1..10: note = Synthetic
GFSLSTSGVG

SEQ ID NO: 467 - protein, 7 aa, synthetic construct
  REGION 1..7: note = Synthetic
IYWNDHK

SEQ ID NO: 468 - protein, 16 aa, synthetic construct
  REGION 1..16: note = Synthetic
AHYSGSYSYYYYGLDV

SEQ ID NO: 469 - DNA, 321 bp, synthetic construct
  misc_feature 1..321: note = Synthetic
  source 1..321: mol_type = other DNA
gacatccagatgacccagtctccatcttccgtgtctgcatctgtaggagacagagtcaccatcacttgtcgggcgagtcagggtattgccagctggttagcctggtatcagcagaaaccagggaaagcccctgagctcctgatctatgctgcatccagtttgcaaggtggggtcccatcaaggttcagcggcagtggatctgggacagatttcactctcaccatcagcagcctgcagcctgaagattttgcaatttactattgtcaacaggctaactatttcccgtggacgttcggccaagggaccaaggtggaaatcaaa

SEQ ID NO: 470 - protein, 107 aa, synthetic construct
  REGION 1..107: note = Synthetic
DIQMTQSPSSVSASVGDRVTITCRASQGIASWLAWYQQKPGKAPELLIYAASSLQGGVPSRFSGSGSGTDFTLTISSLQPEDFAIYYCQQANYFPWTFGQGTKVEIK

SEQ ID NO: 471 - protein, 6 aa, synthetic construct
  REGION 1..6: note = Synthetic
QGIASW

SEQ ID NO: 472 - skipped

SEQ ID NO: 473 - protein, 9 aa, synthetic construct
  REGION 1..9: note = Synthetic
QQANYFPWT

SEQ ID NO: 474 - DNA, 363 bp, synthetic construct
  misc_feature 1..363: note = Synthetic
  source 1..363: mol_type = other DNA
gaggtgcagctgttggagtctgggggagccttggtacagcctggggggtccctgagactctcctgtgcagcctctggattcacctttacctcctatgccatgcactgggtccgccaggctccagggaagggtctggagtgggtctcatctattagaggtagtggtggtggcacatactccgcagactccgtgaagggccggttcaccatctccagagacaattccagggacactctatatctgcaaatgaacagtgtgagagccgaggacacggccgtttattactgtgcgaggtcccatgactacggtgccttcgacttctttgactactggggccagggaaccctggtcaccgtctcctca

SEQ ID NO: 475 - protein, 121 aa, synthetic construct
  REGION 1..121: note = Synthetic
EVQLLESGGALVQPGGSLRLSCAASGFTFTSYAMHWVRQAPGKGLEWVSSIRGSGGGTYSADSVKGRFTISRDNSRDTLYLQMNSVRAEDTAVYYCARSHDYGAFDFFDYWGQGTLVTVSS

SEQ ID NO: 476 - protein, 8 aa, synthetic construct
  REGION 1..8: note = Synthetic
GFTFTSYA

SEQ ID NO: 477 - protein, 8 aa, synthetic construct
  REGION 1..8: note = Synthetic
IRGSGGGT

SEQ ID NO: 478 - protein, 14 aa, synthetic construct
  REGION 1..14: note = Synthetic
ARSHDYGAFDFFDY

SEQ ID NO: 479 - DNA, 321 bp, synthetic construct
  misc_feature 1..321: note = Synthetic
  source 1..321: mol_type = other DNA
gacatccagatgacccagtctccatcctccctgtctgcatctgtaggagacagagtcaccatcacttgccgggcaagtcagggcattagaactgatttaggctggtatcagcagaaaccagggaaagcccctaagcgcctgatctatgctgcatccagtttgcaaagtggggtcccatcaaggttcagcggcagtggatctgggacagaattcactctcacaatcagcagcctgcggcctgaagattttgcaactttttactgtctacagtataatagttacccgctcactttcggcggagggaccaaggtggagatcaaa

SEQ ID NO: 480 - protein, 107 aa, synthetic construct
  REGION 1..107: note = Synthetic
DIQMTQSPSSLSASVGDRVTITCRASQGIRTDLGWYQQKPGKAPKRLIYAASSLQSGVPSRFSGSGSGTEFTLTISSLRPEDFATFYCLQYNSYPLTFGGGTKVEIK

SEQ ID NO: 481 - protein, 6 aa, synthetic construct
  REGION 1..6: note = Synthetic
QGIRTD

SEQ ID NO: 482 - skipped

SEQ ID NO: 483 - protein, 9 aa, synthetic construct
  REGION 1..9: note = Synthetic
LQYNSYPLT

SEQ ID NO: 484 - DNA, 348 bp, synthetic construct
  misc_feature 1..348: note = Synthetic
  source 1..348: mol_type = other DNA
caggtgcagctggtggagtctgggggaggcttggtcaagcctggagggtccctgagactctcctgtgcagcctctggattcaccttcagtgactacttcatgagctggatccgccaggctccagggaaggggctggagtgggtttcatacattagtagtactggtagtaccataaattatgcagactctgtgaagggccgattcaccatctccagggacaatgtcaagaattcactgtatctgcaaatgaccagcctgagagtcgaggacacggccgtgtattactgtacgagagataactggaactatgaatactggggccagggaaccctggtcaccgtctcctca

SEQ ID NO: 485 - protein, 116 aa, synthetic construct
  REGION 1..116: note = Synthetic
QVQLVESGGGLVKPGGSLRLSCAASGFTFSDYFMSWIRQAPGKGLEWVSYISSTGSTINYADSVKGRFTISRDNVKNSLYLQMTSLRVEDTAVYYCTRDNWNYEYWGQGTLVTVSS

SEQ ID NO: 486 - protein, 8 aa, synthetic construct
  REGION 1..8: note = Synthetic
GFTFSDYF

SEQ ID NO: 487 - protein, 8 aa, synthetic construct
  REGION 1..8: note = Synthetic
ISSTGSTI

SEQ ID NO: 488 - protein, 9 aa, synthetic construct
  REGION 1..9: note = Synthetic
TRDNWNYEY

SEQ ID NO: 489 - DNA, 321 bp, synthetic construct
  misc_feature 1..321: note = Synthetic
  source 1..321: mol_type = other DNA
gaaatagtgatgacgcagtctccagccaccctgtctgtgtctccaggggaaagagccaccctctcctgcagggccagtcagagtgttagcatcaacttagcctggtaccagcagaaacctggccaggctcccaggctcctcatctttgttgcatccaccagggccactggtatcccagccaggttcagtggcagtgggtctgggacagagttcactctcaccatcagcagcctgcagtctgaagattttgcaacttattactgtcagcagtatgatatctggccgtacacttttggccaggggaccaagctggagatcaaa

SEQ ID NO: 490 - protein, 107 aa, synthetic construct
  REGION 1..107: note = Synthetic
EIVMTQSPATLSVSPGERATLSCRASQSVSINLAWYQQKPGQAPRLLIFVASTRATGIPARFSGSGSGTEFTLTISSLQSEDFATYYCQQYDIWPYTFGQGTKLEIK

SEQ ID NO: 491 - protein, 6 aa, synthetic construct
  REGION 1..6: note = Synthetic
QSVSIN

SEQ ID NO: 492 - skipped

SEQ ID NO: 493 - protein, 9 aa, synthetic construct
  REGION 1..9: note = Synthetic
QQYDIWPYT

SEQ ID NO: 494 - DNA, 369 bp, synthetic construct
  misc_feature 1..369: note = Synthetic
  source 1..369: mol_type = other DNA
cagctgcagctgcaggagtcgggcccaggactggtgaagccttcggagaccctgtccctcacctgcactgtgtctggtgaatccatcagcagtaatacttactactggggctggatccgccagcccccagggaaggggctggaatggattgggagtatcgattatagtgggaccaccaattataacccgtccctcaagagtcgagtcaccatatccgtagacacgtccaggaatcacttctccctgaggctgaggtctgtgaccgccgcagacacggctgtgtattactgtgcgagagagtggggaaactacggctactattacggtatggacgtttggggccaagggaccacggtcaccgtctcctca

SEQ ID NO: 495 - protein, 123 aa, synthetic construct
  REGION 1..123: note = Synthetic
QLQLQESGPGLVKPSETLSLTCTVSGESISSNTYYWGWIRQPPGKGLEWIGSIDYSGTTNYNPSLKSRVTISVDTSRNHFSLRLRSVTAADTAVYYCAREWGNYGYYYGMDVWGQGTTVTVSS

SEQ ID NO: 496 - protein, 10 aa, synthetic construct
  REGION 1..10: note = Synthetic
GESISSNTYY

SEQ ID NO: 497 - protein, 7 aa, synthetic construct
  REGION 1..7: note = Synthetic
IDYSGTT

SEQ ID NO: 498 - protein, 15 aa, synthetic construct
  REGION 1..15: note = Synthetic
AREWGNYGYYYGMDV

SEQ ID NO: 499 - DNA, 321 bp, synthetic construct
  misc_feature 1..321: note = Synthetic
  source 1..321: mol_type = other DNA
gacatccagatgacccagtctccatcctccctgtctgcatctgtaggagacagagtcaccatcaattgccgggcaagtcagggcattagaaatgatttaggctggtatcagcagaaaccagggaaagcccctaagcgcctgatctatgctgcatccagtttgcaaagtggggtcccattaaggttcagtggcagtggatctgggacagaattcactctcacaatcaacaacctgcagcctgaagattttgcaacttattactgtctatcgcataatagttacccgtggacgttcggccaagggaccaaggtggaaatcaaa

SEQ ID NO: 500 - protein, 107 aa, synthetic construct
  REGION 1..107: note = Synthetic
DIQMTQSPSSLSASVGDRVTINCRASQGIRNDLGWYQQKPGKAPKRLIYAASSLQSGVPLRFSGSGSGTEFTLTINNLQPEDFATYYCLSHNSYPWTFGQGTKVEIK

SEQ ID NO: 501 - protein, 6 aa, synthetic construct
  REGION 1..6: note = Synthetic
QGIRND

SEQ ID NO: 502 - skipped

SEQ ID NO: 503 - protein, 9 aa, synthetic construct
  REGION 1..9: note = Synthetic
LSHNSYPWT

SEQ ID NO: 504 - DNA, 354 bp, synthetic construct
  misc_feature 1..354: note = Synthetic
  source 1..354: mol_type = other DNA
caggtgcagctggtgcagtctggggctgaggtgaagaagcctgggtcctcggtgagggtctcctgcaaggcttctagaggcaccttcagcagctatgctatcagctgggtgcgacaggcccctggacaaggccttgagtggatgggagggatcatccccatctttggtacagcaaactacgcacagaagttcctggccagagtcacgattaccgcggacgaatccacgagcacagcctacatggagctgagcagcctgagatctgaggacacggccgtgtattactgtgcgagagagaaggggtggaactactttgactactggggccagggaaccctggtcaccgtctcctca

SEQ ID NO: 505 - protein, 118 aa, synthetic construct
  REGION 1..118: note = Synthetic
QVQLVQSGAEVKKPGSSVRVSCKASRGTFSSYAISWVRQAPGQGLEWMGGIIPIFGTANYAQKFLARVTITADESTSTAYMELSSLRSEDTAVYYCAREKGWNYFDYWGQGTLVTVSS

SEQ ID NO: 506 - protein, 8 aa, synthetic construct
  REGION 1..8: note = Synthetic
RGTFSSYA

SEQ ID NO: 507 - protein, 8 aa, synthetic construct
  REGION 1..8: note = Synthetic
IIPIFGTA

SEQ ID NO: 508 - protein, 11 aa, synthetic construct
  REGION 1..11: note = Synthetic
AREKGWNYFDY

SEQ ID NO: 509 - DNA, 321 bp, synthetic construct
  misc_feature 1..321: note = Synthetic
  source 1..321: mol_type = other DNA
gacatccagatgacccagtctccaccttccgtgtctgcatctgtaggagacagagtcaccatcacttgtcgggcgagtcagggtattagcagctggttagcctggtatcagcagaaaccagggaaagcccctaaactcctgatctatgctgcatccagtttgcaaagtggggtcccatcaaggttcagcggcagtggatctgggacagatttcactctcaccatcagcagcctgcagcctgaagattttgcaacttactattgtcaacaggctaacagtttccctcggacgttcggccaagggaccaaggtggaaatcaaa

SEQ ID NO: 510 - protein, 107 aa, synthetic construct
  REGION 1..107: note = Synthetic
DIQMTQSPPSVSASVGDRVTITCRASQGISSWLAWYQQKPGKAPKLLIYAASSLQSGVPSRFSGSGSGTDFTLTISSLQPEDFATYYCQQANSFPRTFGQGTKVEIK

SEQ ID NO: 511 - protein, 6 aa, synthetic construct
  REGION 1..6: note = Synthetic
QGISSW

SEQ ID NO: 512 - skipped

SEQ ID NO: 513 - protein, 9 aa, synthetic construct
  REGION 1..9: note = Synthetic
QQANSFPRT

SEQ ID NO: 514 - DNA, 369 bp, synthetic construct
  misc_feature 1..369: note = Synthetic
  source 1..369: mol_type = other DNA
caggtgcagctggtggagtctgggggaggcttggtcaagcctggagggtccctgagactctcctgtgcagcctctggattcaccttcagtgactactacatgaactggatccgccaggctccagggaaggggctggagtgggtttcatacattagtagtagtgggactaccatatactacgcagactctgtgaagggccgattcaccatctccagggacaacgccaagaaatcactgtatctggagatgaacagcctcagagccgaggacacggccgtgtactactgtgcgagagaggggtacggtaatgactactattactacggtatagacgtctggggccaagggaccacggtcaccgtctcctca

SEQ ID NO: 515 - protein, 123 aa, synthetic construct
  REGION 1..123: note = Synthetic
QVQLVESGGGLVKPGGSLRLSCAASGFTFSDYYMNWIRQAPGKGLEWVSYISSSGTTIYYADSVKGRFTISRDNAKKSLYLEMNSLRAEDTAVYYCAREGYGNDYYYYGIDVWGQGTTVTVSS

SEQ ID NO: 516 - protein, 8 aa, synthetic construct
  REGION 1..8: note = Synthetic
GFTFSDYY

SEQ ID NO: 517 - protein, 8 aa, synthetic construct
  REGION 1..8: note = Synthetic
ISSSGTTI

SEQ ID NO: 518 - protein, 16 aa, synthetic construct
  REGION 1..16: note = Synthetic
AREGYGNDYYYYGIDV

SEQ ID NO: 519 - DNA, 336 bp, synthetic construct
  misc_feature 1..336: note = Synthetic
  source 1..336: mol_type = other DNA
gatattgtgatgactcagtctccactctccctgcccgtcacccctggagagccggcctccatctcctgcaggtctagtcagagcctcctgcatggtaatggatacaactatttgacttggtacctgcagaagccagggcagtctccacagctcctgatctatttgggttctaatcgggcctccggggtccctgacaggttcagtggcagtggatcaggcacagattttacactgaaaataagcagagtggaggctgaggatgttggggtttattactgcatgcaagctctacaaactccgtacacttttggccaggggaccaagctggagatcaaa

SEQ ID NO: 520 - protein, 112 aa, synthetic construct
  REGION 1..112: note = Synthetic
DIVMTQSPLSLPVTPGEPASISCRSSQSLLHGNGYNYLTWYLQKPGQSPQLLIYLGSNRASGVPDRFSGSGSGTDFTLKISRVEAEDVGVYYCMQALQTPYTFGQGTKLEIK

SEQ ID NO: 521 - protein, 11 aa, synthetic construct
  REGION 1..11: note = Synthetic
QSLLHGNGYNY

SEQ ID NO: 522 - skipped

SEQ ID NO: 523 - protein, 9 aa, synthetic construct
  REGION 1..9: note = Synthetic
MQALQTPYT

SEQ ID NO: 524 - DNA, 366 bp, synthetic construct
  misc_feature 1..366: note = Synthetic
  source 1..366: mol_type = other DNA
caggtgcagctggtggagtctgggggaggcgtggtccagcctgggaggtccctgagactctcctgtgcagcctctggattcaccttcagtagctttggcatgcactgggtccgccaggctccaggcaaggggctggagtgggtgatatttatatcatatgatggaagtgataaatactatgcagactccgtgaagggccgattcgccatctccagagacagttccaagaacacgctatatctgcaaatgaacagcctgagagctgaggacacggctgtgtattactgtgcgaaagaaaacggtattttgactgattcctacggtatggacgtctggggccaagggaccacggtcaccgtctcctca

SEQ ID NO: 525 - protein, 122 aa, synthetic construct
  REGION 1..122: note = Synthetic
QVQLVESGGGVVQPGRSLRLSCAASGFTFSSFGMHWVRQAPGKGLEWVIFISYDGSDKYYADSVKGRFAISRDSSKNTLYLQMNSLRAEDTAVYYCAKENGILTDSYGMDVWGQGTTVTVSS

SEQ ID NO: 526 - protein, 8 aa, synthetic construct
  REGION 1..8: note = Synthetic
GFTFSSFG

SEQ ID NO: 527 - protein, 8 aa, synthetic construct
  REGION 1..8: note = Synthetic
ISYDGSDK

SEQ ID NO: 528 - protein, 15 aa, synthetic construct
  REGION 1..15: note = Synthetic
AKENGILTDSYGMDV

SEQ ID NO: 529 - DNA, 324 bp, synthetic construct; identical to SEQ ID NO: 17
  misc_feature 1..324: note = Synthetic
  source 1..324: mol_type = other DNA

SEQ ID NO: 530 - protein, 108 aa, synthetic construct; identical to SEQ ID NO: 18
  REGION 1..108: note = Synthetic

SEQ ID NO: 531 - protein, 6 aa, synthetic construct
  REGION 1..6: note = Synthetic
QSISSY

SEQ ID NO: 532 - skipped

SEQ ID NO: 533 - protein, 10 aa, synthetic construct
  REGION 1..10: note = Synthetic
QQSYSTPPIT

SEQ ID NO: 534 - DNA, 372 bp, synthetic construct
  misc_feature 1..372: note = Synthetic
  source 1..372: mol_type = other DNA
caggttcagctggtgcagtctggagctgaggtgaagaagcctggggcctctgtgaaggtctcctgcaaggcttctggttacacctttaccagctatggtatcagctgggtgcgacaggcccctggacaagggcttgagtggatgggatggatcagtgtttaccatggtaacacaaactatgcacagaagttccagggcagagtcaccatgaccacagacacatccacgagcacagcctacatggagctgaggagcctgagatctgacgacacggccgtgtattactgtgcgagagaggggtattacgatttttggagtggttattacccttttgactactggggccagggaaccctggtcaccgtctcctca

SEQ ID NO: 535 - protein, 124 aa, synthetic construct
  REGION 1..124: note = Synthetic
QVQLVQSGAEVKKPGASVKVSCKASGYTFTSYGISWVRQAPGQGLEWMGWISVYHGNTNYAQKFQGRVTMTTDTSTSTAYMELRSLRSDDTAVYYCAREGYYDFWSGYYPFDYWGQGTLVTVSS

SEQ ID NO: 536 - protein, 8 aa, synthetic construct
  REGION 1..8: note = Synthetic
GYTFTSYG

SEQ ID NO: 537 - protein, 8 aa, synthetic construct
  REGION 1..8: note = Synthetic
ISVYHGNT

SEQ ID NO: 538 - protein, 17 aa, synthetic construct
  REGION 1..17: note = Synthetic
AREGYYDFWSGYYPFDY

SEQ ID NO: 539 - DNA, 324 bp, synthetic construct; identical to SEQ ID NO: 17
  misc_feature 1..324: note = Synthetic
  source 1..324: mol_type = other DNA

SEQ ID NO: 540 - protein, 108 aa, synthetic construct; identical to SEQ ID NO: 18
  REGION 1..108: note = Synthetic

SEQ ID NO: 541 - protein, 6 aa, synthetic construct
  REGION 1..6: note = Synthetic
QSISSY

SEQ ID NO: 542 - skipped

SEQ ID NO: 543 - protein, 10 aa, synthetic construct
  REGION 1..10: note = Synthetic
QQSYSTPPIT

SEQ ID NO: 544 - DNA, 354 bp, synthetic construct
  misc_feature 1..354: note = Synthetic
  source 1..354: mol_type = other DNA
gaggtgcagctggtggagtctgggggaggcttgatacaacctggagggtccctgagactctcctgtgaagcctctggattcaccttcagaaattatgaaatgaattgggtccgccaggctccagggaaggggctggagtgggtttcatatattagtagtagtggtaatatgaaagactacgcagagtctgtgaagggccgattcaccatctccagagacaatgtcaagaattcactgcagctgcaaatgaacagcctgagagtcgaggacacggctgtttattactgtgcgagagacgagtttccttacggaatggacgtctggggccaagggaccacggtcaccgtctcctca

SEQ ID NO: 545 - protein, 118 aa, synthetic construct
  REGION 1..118: note = Synthetic
EVQLVESGGGLIQPGGSLRLSCEASGFTFRNYEMNWVRQAPGKGLEWVSYISSSGNMKDYAESVKGRFTISRDNVKNSLQLQMNSLRVEDTAVYYCARDEFPYGMDVWGQGTTVTVSS

SEQ ID NO: 546 - protein, 8 aa, synthetic construct
  REGION 1..8: note = Synthetic
GFTFRNYE

SEQ ID NO: 547 - protein, 8 aa, synthetic construct
  REGION 1..8: note = Synthetic
ISSSGNMK

SEQ ID NO: 548 - protein, 11 aa, synthetic construct
  REGION 1..11: note = Synthetic
ARDEFPYGMDV

SEQ ID NO: 549 - DNA, 324 bp, synthetic construct; identical to SEQ ID NO: 17
  misc_feature 1..324: note = Synthetic
  source 1..324: mol_type = other DNA

SEQ ID NO: 550 - protein, 108 aa, synthetic construct; identical to SEQ ID NO: 18
  REGION 1..108: note = Synthetic

SEQ ID NO: 551 - protein, 6 aa, synthetic construct
  REGION 1..6: note = Synthetic
QSISSY

SEQ ID NO: 552 - skipped

SEQ ID NO: 553 - protein, 10 aa, synthetic construct
  REGION 1..10: note = Synthetic
QQSYSTPPIT

SEQ ID NO: 554 - DNA, 363 bp, synthetic construct
  misc_feature 1..363: note = Synthetic
  source 1..363: mol_type = other DNA
gaagtgcagctggtggagtctgggggaggcttggttcagcctggcaggtccctgagactctcctgtgcagcctctggattcacctttgatgattatgccatgaactgggtccggcaagctccagggaagggcctggagtgggtctcaggtattagttggagtagtggtagcatggactatgcggactctgtgaagggccgattcaccatctccagagacaacgccaaaaactccctgtatctgcaaatgaacagtctgagaactgaggacacggccttatattactgtgcaaaagctagggaagttggagactactacggtatggacgtctggggccaagggaccacggtcaccgtctcctca

SEQ ID NO: 555 - protein, 121 aa, synthetic construct
  REGION 1..121: note = Synthetic
EVQLVESGGGLVQPGRSLRLSCAASGFTFDDYAMNWVRQAPGKGLEWVSGISWSSGSMDYADSVKGRFTISRDNAKNSLYLQMNSLRTEDTALYYCAKAREVGDYYGMDVWGQGTTVTVSS

SEQ ID NO: 556 - protein, 8 aa, synthetic construct
  REGION 1..8: note = Synthetic
GFTFDDYA

SEQ ID NO: 557 - protein, 8 aa, synthetic construct
  REGION 1..8: note = Synthetic
ISWSSGSM

SEQ ID NO: 558 - protein, 14 aa, synthetic construct
  REGION 1..14: note = Synthetic
AKAREVGDYYGMDV

SEQ ID NO: 559 - DNA, 324 bp, synthetic construct; identical to SEQ ID NO: 17
  misc_feature 1..324: note = Synthetic
  source 1..324: mol_type = other DNA

SEQ ID NO: 560 - protein, 108 aa, synthetic construct; identical to SEQ ID NO: 18
  REGION 1..108: note = Synthetic

SEQ ID NO: 561 - protein, 6 aa, synthetic construct
  REGION 1..6: note = Synthetic
QSISSY

SEQ ID NO: 562 - skipped

SEQ ID NO: 563 - protein, 10 aa, synthetic construct
  REGION 1..10: note = Synthetic
QQSYSTPPIT

SEQ ID NO: 564 - DNA, 357 bp, synthetic construct
  misc_feature 1..357: note = Synthetic
  source 1..357: mol_type = other DNA
gaagtgcagctggtggagtctgggggaggcttggtacagcctggcaggtccctgacactctcctgtgcagcctctggattcacctttgataattttggcatgcactgggtccggcaaggtccagggaagggcctggaatgggtctcaggtcttacttggaatagtggtgtcataggctatgcggactctgtgaagggccgattcaccatctccagagacaacgccaagaactccctgtatctgcaaatgaacagtctgagacctgaggacacggccttatattactgtgcaaaagatatacggaattacggcccctttgactactggggccagggaaccctggtcaccgtctcctca

SEQ ID NO: 565 - protein, 119 aa, synthetic construct
  REGION 1..119: note = Synthetic
EVQLVESGGGLVQPGRSLTLSCAASGFTFDNFGMHWVRQGPGKGLEWVSGLTWNSGVIGYADSVKGRFTISRDNAKNSLYLQMNSLRPEDTALYYCAKDIRNYGPFDYWGQGTLVTVSS

SEQ ID NO: 566 - protein, 8 aa, synthetic construct
  REGION 1..8: note = Synthetic
GFTFDNFG

SEQ ID NO: 567 - protein, 8 aa, synthetic construct
  REGION 1..8: note = Synthetic
LTWNSGVI

SEQ ID NO: 568 - protein, 12 aa, synthetic construct
  REGION 1..12: note = Synthetic
AKDIRNYGPFDY

SEQ ID NO: 569 - DNA, 324 bp, synthetic construct
  misc_feature 1..324: note = Synthetic
  source 1..324: mol_type = other DNA
gaaattgtgttgacgcagtctccaggcaccctgtctttgtctccaggggaaagagccaccctctcctgcagggccagtcagagtgttagcagcagctacttagcctggtaccagcagaaacctggccaggctcccaggctcctcatctatggtgcatccagcagggccactggcatcccagacaggttcagtggcagtgggtctgggacagacttcactctcaccatcagcagactggagcctgaagattttgcagtgtattactgtcagcagtatggtagctcaccttggacgttcggccaagggaccaaggtggaaatcaaa

SEQ ID NO: 570 - protein, 108 aa, synthetic construct
  REGION 1..108: note = Synthetic
EIVLTQSPGTLSLSPGERATLSCRASQSVSSSYLAWYQQKPGQAPRLLIYGASSRATGIPDRFSGSGSGTDFTLTISRLEPEDFAVYYCQQYGSSPWTFGQGTKVEIK

SEQ ID NO: 571 - protein, 7 aa, synthetic construct
  REGION 1..7: note = Synthetic
QSVSSSY

SEQ ID NO: 572 - skipped

SEQ ID NO: 573 - protein, 9 aa, synthetic construct
  REGION 1..9: note = Synthetic
QQYGSSPWT

SEQ ID NO: 574 - DNA, 357 bp, synthetic construct
  misc_feature 1..357: note = Synthetic
  source 1..357: mol_type = other DNA
gaggtgcagctggtggagtctgggggaggcttagtacagcctggagggtccctaagactctcctgtgcagcctctggattcaccttcaatatttttgaaatgaactgggtccgccaggctccagggaaggggctggagtggatttcctacattagtagtcgtggaactaccacatactacgcagactctgtgaggggccgattcaccatctccagagacaacgccaagaactcactgtatctgcaaatgaacagcctgagagccgaggacacggctgtttattactgtgcgagagattatgaagcaacaatcccttttgacttctggggccagggaaccctggtcaccgtctcctca

SEQ ID NO: 575 - protein, 119 aa, synthetic construct
  REGION 1..119: note = Synthetic
EVQLVESGGGLVQPGGSLRLSCAASGFTFNIFEMNWVRQAPGKGLEWISYISSRGTTTYYADSVRGRFTISRDNAKNSLYLQMNSLRAEDTAVYYCARDYEATIPFDFWGQGTLVTVSS

SEQ ID NO: 576 - protein, 8 aa, synthetic construct
  REGION 1..8: note = Synthetic
GFTFNIFE

SEQ ID NO: 577 - protein, 8 aa, synthetic construct
  REGION 1..8: note = Synthetic
ISSRGTTT

SEQ ID NO: 578 - protein, 12 aa, synthetic construct
  REGION 1..12: note = Synthetic
ARDYEATIPFDF

SEQ ID NO: 579 - DNA, 324 bp, synthetic construct; identical to SEQ ID NO: 17
  misc_feature 1..324: note = Synthetic
  source 1..324: mol_type = other DNA

SEQ ID NO: 580 - protein, 108 aa, synthetic construct; identical to SEQ ID NO: 18
  REGION 1..108: note = Synthetic

SEQ ID NO: 581 - protein, 6 aa, synthetic construct
  REGION 1..6: note = Synthetic
QSISSY

SEQ ID NO: 582 - skipped

SEQ ID NO: 583 - protein, 10 aa, synthetic construct
  REGION 1..10: note = Synthetic
QQSYSTPPIT

SEQ ID NO: 584 - DNA, 363 bp, synthetic construct
  misc_feature 1..363: note = Synthetic
  source 1..363: mol_type = other DNA
gaggtgcagctggtggagtctgggggaagtgtggtacggcctggggggtccctgagactctcctgtgaagcctctggattcacctttgatgattatggcatgagctgggtccgccaagatccagggaaggggctggagtgggtctctggtattaattggaatggtgatagaacaaattatgcagactctgtgaagggccgattcatcatttccagagacaacgccaagaactctgtgtatctacaaatgaacagtctgagagcggaggactcggccttgtatcactgtgcgagagatcagggactcggagtggcagctacccttgactactggggccagggaaccctggtcaccgtctcctca

SEQ ID NO: 585 - protein, 121 aa, synthetic construct
  REGION 1..121: note = Synthetic
EVQLVESGGSVVRPGGSLRLSCEASGFTFDDYGMSWVRQDPGKGLEWVSGINWNGDRTNYADSVKGRFIISRDNAKNSVYLQMNSLRAEDSALYHCARDQGLGVAATLDYWGQGTLVTVSS

SEQ ID NO: 586 - protein, 8 aa, synthetic construct
  REGION 1..8: note = Synthetic
GFTFDDYG

SEQ ID NO: 587 - protein, 8 aa, synthetic construct
  REGION 1..8: note = Synthetic
INWNGDRT

SEQ ID NO: 588 - protein, 14 aa, synthetic construct
  REGION 1..14: note = Synthetic
ARDQGLGVAATLDY

SEQ ID NO: 589 - DNA, 324 bp, synthetic construct; identical to SEQ ID NO: 17
  misc_feature 1..324: note = Synthetic
  source 1..324: mol_type = other DNA

SEQ ID NO: 590 - protein, 108 aa, synthetic construct; identical to SEQ ID NO: 18
  REGION 1..108: note = Synthetic

SEQ ID NO: 591 - protein, 6 aa, synthetic construct
  REGION 1..6: note = Synthetic
QSISSY

SEQ ID NO: 592 - skipped

SEQ ID NO: 593 - protein, 10 aa, synthetic construct
  REGION 1..10: note = Synthetic
QQSYSTPPIT

SEQ ID NO: 594 - DNA, 384 bp, synthetic construct
  misc_feature 1..384: note = Synthetic
  source 1..384: mol_type = other DNA
gaggtgcagctggtggagtctgggggaggcttggtacagcctggagggtccctgagactctcctgtgcagcctctggattcaccgtcagtaattatgaaatgaactgggtccgccaggctccagggaaggggctggagtgggtttcatacattagtagtagtaccagtaacatatactacgcagactctgtgaagggccgattcaccatctccagagacaacgccgagaactcactgtatctgcagatgaacagcctgagagtcgaggacacggctgtttattactgtgtgagagatgggattgtagtagttccagttggtcgtggatactactattacggtttggacgtctggggccaagggaccacggtcaccgtctcctca

SEQ ID NO: 595 - protein, 128 aa, synthetic construct
  REGION 1..128: note = Synthetic
EVQLVESGGGLVQPGGSLRLSCAASGFTVSNYEMNWVRQAPGKGLEWVSYISSSTSNIYYADSVKGRFTISRDNAENSLYLQMNSLRVEDTAVYYCVRDGIVVVPVGRGYYYYGLDVWGQGTTVTVSS

SEQ ID NO: 596 - protein, 8 aa, synthetic construct
  REGION 1..8: note = Synthetic
GFTVSNYE

SEQ ID NO: 597 - protein, 8 aa, synthetic construct
  REGION 1..8: note = Synthetic
ISSSTSNI

SEQ ID NO: 598 - protein, 21 aa, synthetic construct
  REGION 1..21: note = Synthetic
VRDGIVVVPVGRGYYYYGLDV

SEQ ID NO: 599 - DNA, 324 bp, synthetic construct; identical to SEQ ID NO: 17
  misc_feature 1..324: note = Synthetic
  source 1..324: mol_type = other DNA

SEQ ID NO: 600 - protein, 108 aa, synthetic construct; identical to SEQ ID NO: 18
  REGION 1..108: note = Synthetic

SEQ ID NO: 601 - protein, 6 aa, synthetic construct
  REGION 1..6: note = Synthetic
QSISSY

SEQ ID NO: 602 - skipped

SEQ ID NO: 603 - protein, 10 aa, synthetic construct
  REGION 1..10: note = Synthetic
QQSYSTPPIT

SEQ ID NO: 604 - DNA, 378 bp, synthetic construct
  misc_feature 1..378: note = Synthetic
  source 1..378: mol_type = other DNA
caggtgcagctggtggagtctgggggaggcgtggtccagcctggaaggtccctgagactctcctgcgcagcctctggattcccctttagtaattatgtcatgtattgggtccgccaggctccaggcaaggggctggagtgggtggctcttattttttttgacggaaagaaaaactatcatgcagactccgtgaagggccgattcaccataaccagagacaattccaaaaatatgttatatctgcaaatgaacagcctgagacctgaggacgcggctgtgtattactgtgcgaaaatccattgtcctaatggtgtatgttacaaggggtattacggaatggacgtctggggccaagggaccacggtcaccgtctcctca

SEQ ID NO: 605 - protein, 126 aa, synthetic construct
  REGION 1..126: note = Synthetic
QVQLVESGGGVVQPGRSLRLSCAASGFPFSNYVMYWVRQAPGKGLEWVALIFFDGKKNYHADSVKGRFTITRDNSKNMLYLQMNSLRPEDAAVYYCAKIHCPNGVCYKGYYGMDVWGQGTTVTVSS

SEQ ID NO: 606 - protein, 8 aa, synthetic construct
  REGION 1..8: note = Synthetic
GFPFSNYV

SEQ ID NO: 607 - protein, 8 aa, synthetic construct
  REGION 1..8: note = Synthetic
IFFDGKKN

SEQ ID NO: 608 - protein, 19 aa, synthetic construct
  REGION 1..19: note = Synthetic
AKIHCPNGVCYKGYYGMDV

SEQ ID NO: 609 - DNA, 324 bp, synthetic construct; identical to SEQ ID NO: 17
  misc_feature 1..324: note = Synthetic
  source 1..324: mol_type = other DNA

SEQ ID NO: 610 - protein, 108 aa, synthetic construct; identical to SEQ ID NO: 18
  REGION 1..108: note = Synthetic

SEQ ID NO: 611 - protein, 6 aa, synthetic construct
  REGION 1..6: note = Synthetic
QSISSY

SEQ ID NO: 612 - skipped

SEQ ID NO: 613 - protein, 10 aa, synthetic construct
  REGION 1..10: note = Synthetic
QQSYSTPPIT

SEQ ID NO: 614 - DNA, 375 bp, synthetic construct
  misc_feature 1..375: note = Synthetic
  source 1..375: mol_type = other DNA
gaggtgcagctggtggagtctgggggaggcttggtccagcctggggggtccctaagactctcctgtgcagcctctggattcacctttagtaactattggatgaactgggtccgccaggctccagggaagggactggagtgggtggccaatataaaagaagatggaggtaagaaattgtatgtggactctgtgaagggccgattcaccatctccagagacaacgccaagaactcactgtttctgcaaatgaacagcctgagagccgaggacacggctgtgtattattgtgcgagagaagatacaactttggttgtggactactactactacggtatggacgtctggggccaagggaccacggtcaccgtctcctca

SEQ ID NO: 615 - protein, 125 aa, synthetic construct
  REGION 1..125: note = Synthetic
EVQLVESGGGLVQPGGSLRLSCAASGFTFSNYWMNWVRQAPGKGLEWVANIKEDGGKKLYVDSVKGRFTISRDNAKNSLFLQMNSLRAEDTAVYYCAREDTTLVVDYYYYGMDVWGQGTTVTVSS

SEQ ID NO: 616 - protein, 8 aa, synthetic construct
  REGION 1..8: note = Synthetic
GFTFSNYW

SEQ ID NO: 617 - protein, 8 aa, synthetic construct
  REGION 1..8: note = Synthetic
IKEDGGKK

SEQ ID NO: 618 - protein, 18 aa, synthetic construct
  REGION 1..18: note = Synthetic
AREDTTLVVDYYYYGMDV

SEQ ID NO: 619 - DNA, 324 bp, synthetic construct; identical to SEQ ID NO: 17
  misc_feature 1..324: note = Synthetic
  source 1..324: mol_type = other DNA

SEQ ID NO: 620 - protein, 108 aa, synthetic construct; identical to SEQ ID NO: 18
  REGION 1..108: note = Synthetic

SEQ ID NO: 621 - protein, 6 aa, synthetic construct
  REGION 1..6: note = Synthetic
QSISSY

SEQ ID NO: 622 - skipped

SEQ ID NO: 623 - protein, 10 aa, synthetic construct
  REGION 1..10: note = Synthetic
QQSYSTPPIT

SEQ ID NO: 624 - DNA, 366 bp, synthetic construct
  misc_feature 1..366: note = Synthetic
  source 1..366: mol_type = other DNA
caggtccagctggtgcagtctggggctgaggtgaagaagcctgggtcctcggtgaaggtctcctgcaaggcttctggaggcaccttcaacacctatgctatcacctgggtgcgacaggcccctggacaagggcttgaatggatggggggaatcatccctatctctggcatagcagagtacgcacagaagttccagggcagagtcacgatcaccacggatgactcctcgaccacagcctacatggaactgaacagtctgagatctgaggacacggccgtgtattactgtgcgagctggaactacgcactctactacttctacggtatggacgtctggggccgagggaccacggtcaccgtctcctca

SEQ ID NO: 625 - protein, 122 aa, synthetic construct
  REGION 1..122: note = Synthetic
QVQLVQSGAEVKKPGSSVKVSCKASGGTFNTYAITWVRQAPGQGLEWMGGIIPISGIAEYAQKFQGRVTITTDDSSTTAYMELNSLRSEDTAVYYCASWNYALYYFYGMDVWGRGTTVTVSS

SEQ ID NO: 626 - protein, 8 aa, synthetic construct
  REGION 1..8: note = Synthetic
GGTFNTYA

SEQ ID NO: 627 - protein, 8 aa, synthetic construct
  REGION 1..8: note = Synthetic
IIPISGIA

SEQ ID NO: 628 - protein, 15 aa, synthetic construct
  REGION 1..15: note = Synthetic
ASWNYALYYFYGMDV

SEQ ID NO: 629 - DNA, 324 bp, synthetic construct; identical to SEQ ID NO: 569
  misc_feature 1..324: note = Synthetic
  source 1..324: mol_type = other DNA

SEQ ID NO: 630 - protein, 108 aa, synthetic construct; identical to SEQ ID NO: 570
  REGION 1..108: note = Synthetic

SEQ ID NO: 631 - protein, 7 aa, synthetic construct
  REGION 1..7: note = Synthetic
QSVSSSY

SEQ ID NO: 632 - skipped

SEQ ID NO: 633 - protein, 9 aa, synthetic construct
  REGION 1..9: note = Synthetic
QQYGSSPWT

SEQ ID NO: 634 - DNA, 369 bp, synthetic construct
  misc_feature 1..369: note = Synthetic
  source 1..369: mol_type = other DNA
caggtgcagctggtggagtctgggggaggcttggtcaagcctggagggtccctgagactctcctgtgcagcctctggattcaccttcagtgtctattacatgaactggatccgccaggctccagggaagggcctggagtgggtttcatacattagtagtagtggtagtaccatatactacgcagactctgtgaagggccgattcaccatctccagggacaacgccaagaactcactgtatctccaaatgaacagtctgagagccgaggacacggccgtatattactgtgggagagaagggtatagtgggacttattcttattacggtatggacgtctggggccaagggaccacggtcaccgtctcctca

SEQ ID NO: 635 - protein, 123 aa, synthetic construct
  REGION 1..123: note = Synthetic
QVQLVESGGGLVKPGGSLRLSCAASGFTFSVYYMNWIRQAPGKGLEWVSYISSSGSTIYYADSVKGRFTISRDNAKNSLYLQMNSLRAEDTAVYYCGREGYSGTYSYYGMDVWGQGTTVTVSS

SEQ ID NO: 636 - protein, 8 aa, synthetic construct
  REGION 1..8: note = Synthetic
GFTFSVYY

SEQ ID NO: 637 - protein, 8 aa, synthetic construct
  REGION 1..8: note = Synthetic
ISSSGSTI

SEQ ID NO: 638 - protein, 16 aa, synthetic construct
  REGION 1..16: note = Synthetic
GREGYSGTYSYYGMDV

SEQ ID NO: 639 - DNA, 336 bp, synthetic construct
  misc_feature 1..336: note = Synthetic
  source 1..336: mol_type = other DNA
gatattgtgatgactcagtctccactctccctgcccgtcacccctggagagccggcctccatctcctgcaggtctagtcagagcctcctgcatagtaatggatacaactatttggattggtacctgcagaagccagggcagtctccacagttcctgatctatttgggttctaatcgggcctccggggtccctgacaggttcagtggcagtggatcaggcacagattttacactgaaaatcaacagagtggaggctgaggatgttggggtttattactgcatgcaagctctacaaactccgtacacttttggccaggggaccaagctggagatcaaa

SEQ ID NO: 640 - protein, 112 aa, synthetic construct
  REGION 1..112: note = Synthetic
DIVMTQSPLSLPVTPGEPASISCRSSQSLLHSNGYNYLDWYLQKPGQSPQFLIYLGSNRASGVPDRFSGSGSGTDFTLKINRVEAEDVGVYYCMQALQTPYTFGQGTKLEIK

SEQ ID NO: 641 - protein, 11 aa, synthetic construct
  REGION 1..11: note = Synthetic
QSLLHSNGYNY

SEQ ID NO: 642 - skipped

SEQ ID NO: 643 - protein, 9 aa, synthetic construct
  REGION 1..9: note = Synthetic
MQALQTPYT

SEQ ID NO: 644 - DNA, 366 bp, synthetic construct
  misc_feature 1..366: note = Synthetic
  source 1..366: mol_type = other DNA
gaagtgcagctggtggagtctgggggagggttggtacagcctggcaggtccctgagactctcctgtgcagtctctggattcacctttgatgattatgccatgcactgggtccggcaagctccagggaagggcctggagtgggtctcaggtattagttggaatagtggtaccagaggatatgcggactctgtgaagggccgattcaccatctccagagacaacgccaagaactccctgtatctgcaaatgaacagtctgagaggtgaggacacggccttgtattactgtgtaaaagatattacgatatcccccaactactacggtatggacgtctggggccaagggaccacggtcaccgtctcctca

SEQ ID NO: 645 - protein, 122 aa, synthetic construct
  REGION 1..122: note = Synthetic
EVQLVESGGGLVQPGRSLRLSCAVSGFTFDDYAMHWVRQAPGKGLEWVSGISWNSGTRGYADSVKGRFTISRDNAKNSLYLQMNSLRGEDTALYYCVKDITISPNYYGMDVWGQGTTVTVSS

SEQ ID NO: 646 - protein, 8 aa, synthetic construct
  REGION 1..8: note = Synthetic
GFTFDDYA

SEQ ID NO: 647 - protein, 8 aa, synthetic construct
  REGION 1..8: note = Synthetic
ISWNSGTR

SEQ ID NO: 648 - protein, 15 aa, synthetic construct
  REGION 1..15: note = Synthetic
VKDITISPNYYGMDV

SEQ ID NO: 649 - DNA, 321 bp, synthetic construct
  misc_feature 1..321: note = Synthetic
  source 1..321: mol_type = other DNA
gacatccagatgacccagtctccatcctccctgtctgcatctgtaggagacagagtcaccatcacttgccgggcgagtcaggacattagccattattcagcctggtatcagcagaaaccagggaaacttcctaacctcctgatctatgctgcatccactttgcaatcaggggtcccatctcggttcagtggcagtggatctgggacagatttctctctcaccaccagcagcctgcagcctgaagatgttgcaacttattactgtcaaaagtataacagtgtccctctcactttcggcggagggaccaaggtggagatcaaa

SEQ ID NO: 650 - protein, 107 aa, synthetic construct
  REGION 1..107: note = Synthetic
DIQMTQSPSSLSASVGDRVTITCRASQDISHYSAWYQQKPGKLPNLLIYAASTLQSGVPSRFSGSGSGTDFSLTTSSLQPEDVATYYCQKYNSVPLTFGGGTKVEIK

SEQ ID NO: 651 - protein, 6 aa, synthetic construct
  REGION 1..6: note = Synthetic
QDISHY

SEQ ID NO: 652 - skipped

SEQ ID NO: 653 - protein, 9 aa, synthetic construct
  REGION 1..9: note = Synthetic
QKYNSVPLT

SEQ ID NO: 654 - protein, 118 aa, synthetic construct
  REGION 1..118: note = Synthetic
EVQLVESGGGLVQPGNSLTLSCVASGFTFSNYGMHWIRQAPKKGLEWIAMIYYDSSKMNYADTVKGRFTISRDNSKNTLYLEMNSLRSEDTAMYYCAVPTSHYVVDVWGQGVSVTVSS

SEQ ID NO: 655 - protein, 107 aa, synthetic construct
  REGION 1..107: note = Synthetic
DIQMTQSPASLSASLEEIVTITCQASQDIGNWLAWYQQKPGKSPQLLIYGATSLADGVPSRFSGSRSGTQFSLKISRVQVEDIGIYYCLQAYNTPWTFGGGTKLELK

SEQ ID NO: 656 - protein, 243 aa, synthetic construct
  REGION 1..243: note = Synthetic
DIQMTQSPSSLSASVGDRVTITCRASQGIRDHFGWYQQKPGKAPKRLIYAASSLHSGVPSRFSGSGSGTEFTLTISSLQPEDFATYYCLQYDTYPLTFGGGTKVEIKGGGGSGGGGSGGGGSEVQLVESGGGLVQPGGSLRLSCATSGFTFTSYDMKWVRQAPGLGLEWVSAISGSGGNTYYADSVKGRFTISRDNSRNTLYLQMNSLRAEDTAVYYCTRSHDFGAFDYFDYWGQGTLVTVSS

SEQ ID NO: 657 - protein, 245 aa, synthetic construct
  REGION 1..245: note = Synthetic
EIVMTQSPATLSVSPGERATLSCRASQTVSSNLAWYQQKPGQAPRLLIYGSSSRATGIPARFSGSGSGTEFTLTISSLQSEDFAVYYCQQYNNWPPYTFGQGTKLEIKGGGGSGGGGSGGGGSEVQLVESGGDLVQPGRSLRLSCAASGFTFDDYAMHWVRQAPGKGLEWVSGISWNSATRVYADSVKGRFTISRDNAKNFLYLQMNSLRSEDTALYHCAKDMDISLGYYGLDVWGQGTTVTVSS

SEQ ID NO: 658 - protein, 246 aa, synthetic construct
  REGION 1..246: note = Synthetic
DIQMTQSPSSVSASVGDRVTITCRASQGIASWLAWYQQKPGKAPELLIYAASSLQGGVPSRFSGSGSGTDFTLTISSLQPEDFAIYYCQQANYFPWTFGQGTKVEIKGGGGSGGGGSGGGGSQITLKESGPTLVKPTQTLTLTCTFSGFSLSTSGVGVVWIRQPPGKALEWLALIYWNDHKRYSPSLGSRLTITKDTSKNQVVLTMTNMDPVDTATYYCAHYSGSYSYYYYGLDVWGQGTTVTVSS

SEQ ID NO: 659 - protein, 243 aa, synthetic construct
  REGION 1..243: note = Synthetic
DIQMTQSPSSLSASVGDRVTITCRASQGIRTDLGWYQQKPGKAPKRLIYAASSLQSGVPSRFSGSGSGTEFTLTISSLRPEDFATFYCLQYNSYPLTFGGGTKVEIKGGGGSGGGGSGGGGSEVQLLESGGALVQPGGSLRLSCAASGFTFTSYAMHWVRQAPGKGLEWVSSIRGSGGGTYSADSVKGRFTISRDNSRDTLYLQMNSVRAEDTAVYYCARSHDYGAFDFFDYWGQGTLVTVSS

SEQ ID NO: 660 - protein, 238 aa, synthetic construct
  REGION 1..238: note = Synthetic
EIVMTQSPATLSVSPGERATLSCRASQSVSINLAWYQQKPGQAPRLLIFVASTRATGIPARFSGSGSGTEFTLTISSLQSEDFATYYCQQYDIWPYTFGQGTKLEIKGGGGSGGGGSGGGGSQVQLVESGGGLVKPGGSLRLSCAASGFTFSDYFMSWIRQAPGKGLEWVSYISSTGSTINYADSVKGRFTISRDNVKNSLYLQMTSLRVEDTAVYYCTRDNWNYEYWGQGTLVTVSS

SEQ ID NO: 661 - protein, 245 aa, synthetic construct
  REGION 1..245: note = Synthetic
DIQMTQSPSSLSASVGDRVTINCRASQGIRNDLGWYQQKPGKAPKRLIYAASSLQSGVPLRFSGSGSGTEFTLTINNLQPEDFATYYCLSHNSYPWTFGQGTKVEIKGGGGSGGGGSGGGGSQLQLQESGPGLVKPSETLSLTCTVSGESISSNTYYWGWIRQPPGKGLEWIGSIDYSGTTNYNPSLKSRVTISVDTSRNHFSLRLRSVTAADTAVYYCAREWGNYGYYYGMDVWGQGTTVTVSS

SEQ ID NO: 662 - protein, 240 aa, synthetic construct
  REGION 1..240: note = Synthetic
DIQMTQSPPSVSASVGDRVTITCRASQGISSWLAWYQQKPGKAPKLLIYAASSLQSGVPSRFSGSGSGTDFTLTISSLQPEDFATYYCQQANSFPRTFGQGTKVEIKGGGGSGGGGSGGGGSQVQLVQSGAEVKKPGSSVRVSCKASRGTFSSYAISWVRQAPGQGLEWMGGIIPIFGTANYAQKFLARVTITADESTSTAYMELSSLRSEDTAVYYCAREKGWNYFDYWGQGTLVTVSS

SEQ ID NO: 663 - protein, 250 aa, synthetic construct
  REGION 1..250: note = Synthetic
DIVMTQSPLSLPVTPGEPASISCRSSQSLLHGNGYNYLTWYLQKPGQSPQLLIYLGSNRASGVPDRFSGSGSGTDFTLKISRVEAEDVGVYYCMQALQTPYTFGQGTKLEIKGGGGSGGGGSGGGGSQVQLVESGGGLVKPGGSLRLSCAASGFTFSDYYMNWIRQAPGKGLEWVSYISSSGTTIYYADSVKGRFTISRDNAKKSLYLEMNSLRAEDTAVYYCAREGYGNDYYYYGIDVWGQGTTVTVSS

SEQ ID NO: 664 - protein, 245 aa, synthetic construct
  REGION 1..245: note = Synthetic
DIQMTQSPSSLSASVGDRVTITCRASQSISSYLNWYQQKPGKAPKLLIYAASSLQSGVPSRFSGSGSGTDFTLTISSLQPEDFATYYCQQSYSTPPITFGQGTRLEIKGGGGSGGGGSGGGGSQVQLVESGGGVVQPGRSLRLSCAASGFTFSSFGMHWVRQAPGKGLEWVIFISYDGSDKYYADSVKGRFAISRDSSKNTLYLQMNSLRAEDTAVYYCAKENGILTDSYGMDVWGQGTTVTVSS

SEQ ID NO: 665 - protein, 247 aa, synthetic construct
  REGION 1..247: note = Synthetic
DIQMTQSPSSLSASVGDRVTITCRASQSISSYLNWYQQKPGKAPKLLIYAASSLQSGVPSRFSGSGSGTDFTLTISSLQPEDFATYYCQQSYSTPPITFGQGTRLEIKGGGGSGGGGSGGGGSQVQLVQSGAEVKKPGASVKVSCKASGYTFTSYGISWVRQAPGQGLEWMGWISVYHGNTNYAQKFQGRVTMTTDTSTSTAYMELRSLRSDDTAVYYCAREGYYDFWSGYYPFDYWGQGTLVTVSS

SEQ ID NO: 666 - protein, 241 aa, synthetic construct
  REGION 1..241: note = Synthetic
DIQMTQSPSSLSASVGDRVTITCRASQSISSYLNWYQQKPGKAPKLLIYAASSLQSGVPSRFSGSGSGTDFTLTISSLQPEDFATYYCQQSYSTPPITFGQGTRLEIKGGGGSGGGGSGGGGSEVQLVESGGGLIQPGGSLRLSCEASGFTFRNYEMNWVRQAPGKGLEWVSYISSSGNMKDYAESVKGRFTISRDNVKNSLQLQMNSLRVEDTAVYYCARDEFPYGMDVWGQGTTVTVSS

SEQ ID NO: 667 - protein, 249 aa, synthetic construct
  REGION 1..249: note = Synthetic
DIQMTQSPSSLSASVGDRVTITCRASQSISSYLNWYQQKPGKAPKLLIYAASSLQSGVPSRFSGSGSGTDFTLTISSLQPEDFATYYCQQSYSTPPITFGQGTRLEIKGGGGSGGGGSGGGGSQVQLVESGGGVVQPGRSLRLSCAASGFPFSNYVMYWVRQAPGKGLEWVALIFFDGKKNYHADSVKGRFTITRDNSKNMLYLQMNSLRPEDAAVYYCAKIHCPNGVCYKGYYGMDVWGQGTTVTVSS

SEQ ID NO: 668 - protein, 248 aa, synthetic construct
  REGION 1..248: note = Synthetic
DIQMTQSPSSLSASVGDRVTITCRASQSISSYLNWYQQKPGKAPKLLIYAASSLQSGVPSRFSGSGSGTDFTLTISSLQPEDFATYYCQQSYSTPPITFGQGTRLEIKGGGGSGGGGSGGGGSEVQLVESGGGLVQPGGSLRLSCAASGFTFSNYWMNWVRQAPGKGLEWVANIKEDGGKKLYVDSVKGRFTISRDNAKNSLFLQMNSLRAEDTAVYYCAREDTTLVVDYYYYGMDVWGQGTTVTVSS

SEQ ID NO: 669 - protein, 242 aa, synthetic construct
  REGION 1..242: note = Synthetic
DIQMTQSPSSLSASVGDRVTITCRASQSISSYLNWYQQKPGKAPKLLIYAASSLQSGVPSRFSGSGSGTDFTLTISSLQPEDFATYYCQQSYSTPPITFGQGTRLEIKGGGGSGGGGSGGGGSEVQLVESGGGLVQPGGSLRLSCAASGFTFNIFEMNWVRQAPGKGLEWISYISSRGTTTYYADSVRGRFTISRDNAKNSLYLQMNSLRAEDTAVYYCARDYEATIPFDFWGQGTLVTVSS

SEQ ID NO: 670 - protein, 244 aa, synthetic construct
  REGION 1..244: note = Synthetic
DIQMTQSPSSLSASVGDRVTITCRASQSISSYLNWYQQKPGKAPKLLIYAASSLQSGVPSRFSGSGSGTDFTLTISSLQPEDFATYYCQQSYSTPPITFGQGTRLEIKGGGGSGGGGSGGGGSEVQLVESGGSVVRPGGSLRLSCEASGFTFDDYGMSWVRQDPGKGLEWVSGINWNGDRTNYADSVKGRFIISRDNAKNSVYLQMNSLRAEDSALYHCARDQGLGVAATLDYWGQGTLVTVSS

SEQ ID NO: 671 - protein, 251 aa, synthetic construct
  REGION 1..251: note = Synthetic
DIQMTQSPSSLSASVGDRVTITCRASQSISSYLNWYQQKPGKAPKLLIYAASSLQSGVPSRFSGSGSGTDFTLTISSLQPEDFATYYCQQSYSTPPITFGQGTRLEIKGGGGSGGGGSGGGGSEVQLVESGGGLVQPGGSLRLSCAASGFTVSNYEMNWVRQAPGKGLEWVSYISSSTSNIYYADSVKGRFTISRDNAENSLYLQMNSLRVEDTAVYYCVRDGIVVVPVGRGYYYYGLDVWGQGTTVTVSS

SEQ ID NO: 672 - protein, 244 aa, synthetic construct
  REGION 1..244: note = Synthetic
DIQMTQSPSSLSASVGDRVTITCRASQSISSYLNWYQQKPGKAPKLLIYAASSLQSGVPSRFSGSGSGTDFTLTISSLQPEDFATYYCQQSYSTPPITFGQGTRLEIKGGGGSGGGGSGGGGSEVQLVESGGGLVQPGRSLRLSCAASGFTFDDYAMNWVRQAPGKGLEWVSGISWSSGSMDYADSVKGRFTISRDNAKNSLYLQMNSLRTEDTALYYCAKAREVGDYYGMDVWGQGTTVTVSS

SEQ ID NO: 673 - protein, 242 aa, synthetic construct
  REGION 1..242: note = Synthetic
EIVLTQSPGTLSLSPGERATLSCRASQSVSSSYLAWYQQKPGQAPRLLIYGASSRATGIPDRFSGSGSGTDFTLTISRLEPEDFAVYYCQQYGSSPWTFGQGTKVEIKGGGGSGGGGSGGGGSEVQLVESGGGLVQPGRSLTLSCAASGFTFDNFGMHWVRQGPGKGLEWVSGLTWNSGVIGYADSVKGRFTISRDNAKNSLYLQMNSLRPEDTALYYCAKDIRNYGPFDYWGQGTLVTVSS

SEQ ID NO: 674 - protein, 245 aa, synthetic construct
  REGION 1..245: note = Synthetic
EIVLTQSPGTLSLSPGERATLSCRASQSVSSSYLAWYQQKPGQAPRLLIYGASSRATGIPDRFSGSGSGTDFTLTISRLEPEDFAVYYCQQYGSSPWTFGQGTKVEIKGGGGSGGGGSGGGGSQVQLVQSGAEVKKPGSSVKVSCKASGGTFNTYAITWVRQAPGQGLEWMGGIIPISGIAEYAQKFQGRVTITTDDSSTTAYMELNSLRSEDTAVYYCASWNYALYYFYGMDVWGRGTTVTVSS

SEQ ID NO: 675 - protein, 243 aa, synthetic construct
  REGION 1..243: note = Synthetic
DIQMTQSPSSLSASIGDRVTITCRASQGISNYLAWYQQKPGKVPKLLIYAASTLQSGVPSRFSGSGSGTDFTLTISSLQPEDVATYYCQNHNSVPLTFGGGTKVEIKGGGGSGGGGSGGGGSEVQLVESGGGLVQPGGSLRLSCAASGFTFNSYAMTWVRQAPGKGLEWVSFIGGSTGNTYYAGSVKGRFTISSDNSKKTLYLQMNSLRAEDTAVYYCAKGGAARRMEYFQHWGQGTLVTVSS

SEQ ID NO: 676 - protein, 243 aa, synthetic construct
  REGION 1..243: note = Synthetic
DIQMTQSPSSLSASVGDRVTITCRASQGISNYLAWYQQKPGKVPNLLIYAASTLQSGVPSRFSGSGSGTDFTLTISSLQPEDVATYYCQKYNSAPLTFGGGTKVEIKGGGGSGGGGSGGGGSEVQLVESGGGLVQPGGSLRLSCAASGFAFSSYAMTWVRQAPGKGLEWVSVISGTGGSTYYADSVKGRFTISRDNSKNTLYLQMNSLRAEDTAVYYCAKGGAARRMEYFQYWGQGTLVTVSS

SEQ ID NO: 677 - protein, 250 aa, synthetic construct
  REGION 1..250: note = Synthetic
DIVMTQSPLSLPVTPGEPASISCRSSQSLLHSNGYNYLDWYLQKPGQSPQFLIYLGSNRASGVPDRFSGSGSGTDFTLKINRVEAEDVGVYYCMQALQTPYTFGQGTKLEIKGGGGSGGGGSGGGGSQVQLVESGGGLVKPGGSLRLSCAASGFTFSVYYMNWIRQAPGKGLEWVSYISSSGSTIYYADSVKGRFTISRDNAKNSLYLQMNSLRAEDTAVYYCGREGYSGTYSYYGMDVWGQGTTVTVSS

SEQ ID NO: 678 - protein, 244 aa, synthetic construct
  REGION 1..244: note = Synthetic
DIQMTQSPSSLSASVGDRVTITCRASQDISHYSAWYQQKPGKLPNLLIYAASTLQSGVPSRFSGSGSGTDFSLTTSSLQPEDVATYYCQKYNSVPLTFGGGTKVEIKGGGGSGGGGSGGGGSEVQLVESGGGLVQPGRSLRLSCAVSGFTFDDYAMHWVRQAPGKGLEWVSGISWNSGTRGYADSVKGRFTISRDNAKNSLYLQMNSLRGEDTALYYCVKDITISPNYYGMDVWGQGTTVTVSS

SEQ ID NO: 679 - protein, 239 aa, synthetic construct
  REGION 1..239: note = Synthetic
DIQMTQSPSSLSASVGDRVTITCRASQSIDRYLNWYRQKPGKAPKLLIYTTSSLQSGVPSRFSGSGSGTDFTLTLSSLQPEDFATYYCQQSYSPPLTFGGGTKVEIKGGGGSGGGGSGGGGSQVQLVESGGGVVQPGRSLRLSCAASGFTFSSYGMHWVRQAPGKGLEWVAVIWYDGSNKYYADSVKGRFTISRDISKNTLYLQMNSLRAEDTAVYYCAGQLDLFFDYWGQGTLVTVSS

SEQ ID NO: 680 - protein, 247 aa, synthetic construct
  REGION 1..247: note = Synthetic
DIQMTQSPSSVSASVGDRVTITCRASQGISSWLAWYQQKPGKAPKLLIYAASSLQSGVPSRFSGSGSGTDFTLTISSLQPEDFATYYCQKADSLPYAFGQGTKLEIKGGGGSGGGGSGGGGSEVQLVESGGGLVQPGGSLRLSCTASGFTFSNYWMTWVRQAPGKGLEWVANIKEDGSEKEYVDSVKGRFTISRDNAKNSLYLQMNSLRGEDTAVYYCARDGEQLVDYYYYYVMDVWGQGTTVTVSS

SEQ ID NO: 681 - protein, 249 aa, synthetic construct
  REGION 1..249: note = Synthetic
DIQMTQSPSSLSASVGDRVTITCRASQSISSYLNWYQQKPGKAPKVLIYAASSLQSGVPSRFSGSGSGTDFTLTISSLQPEDFATYYCQQSYSIPLTFGGGTKVEIKGGGGSGGGGSGGGGSEVQLVESGGGLVQPGRSLRLSCAASGFTFDDYAMHWVRQAPGKGLEWVSGISWNSGYIGYADSVKGRFTISRDNAENSLHLQMNSLRAEDTALYYCARGGSTLVRGVKGGYYGMDVWGQGTTVTVSS

SEQ ID NO: 682 - protein, 238 aa, synthetic construct
  REGION 1..238: note = Synthetic
EIVMTQSPATLSVSPGERATLSCRASQSVSSNFAWYQQKPGQAPRLLIYSASSRATGIPVRFSGSGSGTEFTLTISSLQSEDFAVYYCQQYNIWPRTFGQGTKVEIKGGGGSGGGGSGGGGSEVQLVESGGGLVQPGGSLRLSCAVSGFIFSSYEMNWVRQAPGKGLEWVSYISSSGSTIFYADSVKGRFTISRDNAKNSLYLQMNSLRAEDTAVYYCVSGVVLFDVWGQGTMVTVSS

SEQ ID NO: 683 - protein, 247 aa, synthetic construct
  REGION 1..247: note = Synthetic
DIQMTQSPSSVSASVGDRVTITCRASQGISSWLAWYQQKPGKAPKLLIYAASSLQSGVPSRFSGSGSGTDFTLTISSLQPEDFATYYCQKANSFPYTFGQGTKLEIKGGGGSGGGGSGGGGSEVQLVESGGGLVQPGGSLRLSCAASGFTFSNYWMTWVRQAPGKGLEWVANIKEDGSEKDYVDSVKGRFTISRDNAKNSLYLQMNSLRGEDTAVYYCARDGEQLVDYYYYYVMDVWGQGTTVTVSS

SEQ ID NO: 684 - protein, 242 aa, synthetic construct
  REGION 1..242: note = Synthetic
DIQLTQSPSSLSASVGDRVTITCWASQGISSYLAWYQQKPGKAPKLLIYAASTLQSGVPSRFSGSGSGTEFTLTISSLQPEDFATYYCQQLNSYPLTFGGGTKVEIKGGGGSGGGGSGGGGSQVQLVESGGGVVQPGRSLRLSCIASGFTFSVYGIHWVRQAPGKGLEWMAVISHDGNIKHYADSVKGRFTISRDNSKNTLYLQINSLRTEDTAVYYCAKDTWNSLDTFDIWGQGTMVTVSS

SEQ ID NO: 685 - protein, 242 aa, synthetic construct
  REGION 1..242: note = Synthetic
AIQMTQSPSSLSASVGDRVTITCRASQGIRNDLGWYQQKPGKAPKLLIYAASTLQSGVPSRFSGSGSGTDFTLTISSLQPEDFATYYCLQDYNYPFTFGPGTKVDIKGGGGSGGGGSGGGGSQVTLRESGPALVKPSQTLTLTCTFSGFSLNTYGMFVSWIRQPPGKALEWLAHIHWDDDKYYSTSLKTRLTISKDTSKNQVVLTMTNMDPVDTATYYCARGHNNLNYIIHWGQGTLVTVSS

SEQ ID NO: 686 - protein, 245 aa, synthetic construct
  REGION 1..245: note = Synthetic
EIVLTQSPATLSLSPGERATLSCRASQSVSSYLAWYQQKPGQAPRLLIHDVSNRATGIPARFSGSGSGTDFTLTISSLEPEDFVVYYCQQRSDWPITFGQGTRLEIKGGGGSGGGGSGGGGSEVQLVESGGGLVQPGRSLRLSCAASGFTFDDKAMHWVRQVPGKGLEWISGISWNSGTIGYADSVKGRFIISRDNAKNSLYLQMNSLRAEDTALYYCAKDGDTSGWYWYGLDVWGQGTTVTVSS

SEQ ID NO: 687 - protein, 244 aa, synthetic construct
  REGION 1..244: note = Synthetic
DIQMTQSPSSLSASVGDRVTITCRASQSIRNVLGWFQQKPGKAPQRLIYAASSLQSGVPSRFSGSGSGTEFTLTISSLQPEDFATYYCLQHNFYPLTFGGGTKVEIKGGGGSGGGGSGGGGSQVQLVESGGGVVQPGRSLRLSCAASGFTFTTYGMHWVRQAPGKGLEWVAVIWYDGSNKYYGDSVKGRFTISRDNSKNTLYLQMNSLRVDDTAVYYCTRTHGYTRSSDGFDYWGQGTLVTVSS

SEQ ID NO: 688 - protein, 1139 aa, synthetic construct
  REGION 1..1139: note = Synthetic
DIQMTQSPSSVSASVGDRVTITCRASQGIASWLAWYQQKPGKAPELLIYAASSLQGGVPSRFSGSGSGTDFTLTISSLQPEDFAIYYCQQANYFPWTFGQGTKVEIKGGGGSGGGGSGGGGSQITLKESGPTLVKPTQTLTLTCTFSGFSLSTSGVGVVWIRQPPGKALEWLALIYWNDHKRYSPSLGSRLTITKDTSKNQVVLTMTNMDPVDTATYYCAHYSGSYSYYYYGLDVWGQGTTVTVSSGGGGSGGGGSAHPGRPRAVPTQCDVPPNSRFDCAPDKAITQEQCEARGCCYIPAKQGLQGAQMGQPWCFFPPSYPSYKLENLSSSEMGYTATLTRTTPTFFPKDILTLRLDVMMETENRLHFTIKDPANRRYEVPLETPHVHSRAPSPLYSVEFSEEPFGVIVRRQLDGRVLLNTTVAPLFFADQFLQLSTSLPSQYITGLAEHLSPLMLSTSWTRITLWNRDLAPTPGANLYGSHPFYLALEDGGSAHGVFLLNSNAMDVVLQPSPALSWRSTGGILDVYIFLGPEPKSVVQQYLDVVGYPFMPPYWGLGFHLCRWGYSSTAITRQVVENMTRAHFPLDVQWNDLDYMDSRRDFTFNKDGFRDFPAMVQELHQGGRRYMMIVDPAISSSGPAGSYRPYDEGLRRGVFITNETGQPLIGKVWPGSTAFPDFTNPTALAWWEDMVAEFHDQVPFDGMWIDMNEPSNFIRGSEDGCPNNELENPPYVPGVVGGTLQAATICASSHQFLSTHYNLHNLYGLTEAIASHRALVKARGTRPFVISRSTFAGHGRYAGHWTGDVWSSWEQLASSVPEILQFNLLGVPLVGADVCGFLGNTSEELCVRWTQLGAFYPFMRNHNSLLSLPQEPYSFSEPAQQAMRKALTLRYALLPHLYTLFHQAHVAGETVARPLFLEFPKDSSTWTVDHQLLWGEALLITPVLQAGKAEVTGYFPLGTWYDLQTVPVEALGSLPPPPAAPREPAIHSEGQWVTLPAPLDTINVHLRAGYIIPLQGPGLTTTESRQQPMALAVALTKGGEARGELFWDDGESLEVLERGAYTQVIFLARNNTIVNELVRVTSEGAGLQLQKVTVLGVATAPQQVLSNGVPVSNFTYSPDTKVLDICVSLLMGEQFLVSWC

SEQ ID NO: 689 - protein, 1142 aa, synthetic construct
  REGION 1..1142: note = Synthetic
DIQMTQSPSSLSASVGDRVTITCRASQSISSYLNWYQQKPGKAPKLLIYAASSLQSGVPSRFSGSGSGTDFTLTISSLQPEDFATYYCQQSYSTPPITFGQGTRLEIKGGGGSGGGGSGGGGSQVQLVESGGGVVQPGRSLRLSCAASGFPFSNYVMYWVRQAPGKGLEWVALIFFDGKKNYHADSVKGRFTITRDNSKNMLYLQMNSLRPEDAAVYYCAKIHCPNGVCYKGYYGMDVWGQGTTVTVSSGGGGSGGGGSAHPGRPRAVPTQCDVPPNSRFDCAPDKAITQEQCEARGCCYIPAKQGLQGAQMGQPWCFFPPSYPSYKLENLSSSEMGYTATLTRTTPTFFPKDILTLRLDVMMETENRLHFTIKDPANRRYEVPLETPHVHSRAPSPLYSVEFSEEPFGVIVRRQLDGRVLLNTTVAPLFFADQFLQLSTSLPSQYITGLAEHLSPLMLSTSWTRITLWNRDLAPTPGANLYGSHPFYLALEDGGSAHGVFLLNSNAMDVVLQPSPALSWRSTGGILDVYIFLGPEPKSVVQQYLDVVGYPFMPPYWGLGFHLCRWGYSSTAITRQVVENMTRAHFPLDVQWNDLDYMDSRRDFTFNKDGFRDFPAMVQELHQGGRRYMMIVDPAISSSGPAGSYRPYDEGLRRGVFITNETGQPLIGKVWPGSTAFPDFTNPTALAWWEDMVAEFHDQVPFDGMWIDMNEPSNFIRGSEDGCPNNELENPPYVPGVVGGTLQAATICASSHQFLSTHYNLHNLYGLTEAIASHRALVKARGTRPFVISRSTFAGHGRYAGHWTGDVWSSWEQLASSVPEILQFNLLGVPLVGADVCGFLGNTSEELCVRWTQLGAFYPFMRNHNSLLSLPQEPYSFSEPAQQAMRKALTLRYALLPHLYTLFHQAHVAGETVARPLFLEFPKDSSTWTVDHQLLWGEALLITPVLQAGKAEVTGYFPLGTWYDLQTVPVEALGSLPPPPAAPREPAIHSEGQWVTLPAPLDTINVHLRAGYIIPLQGPGLTTTESRQQPMALAVALTKGGEARGELFWDDGESLEVLERGAYTQVIFLARNNTIVNELVRVTSEGAGLQLQKVTVLGVATAPQQVLSNGVPVSNFTYSPDTKVLDICVSLLMGEQFLVSWC

SEQ ID NO: 690 - protein, 1135 aa, synthetic construct
  REGION 1..1135: note = Synthetic
DIQMTQSPSSLSASVGDRVTITCRASQSISSYLNWYQQKPGKAPKLLIYAASSLQSGVPSRFSGSGSGTDFTLTISSLQPEDFATYYCQQSYSTPPITFGQGTRLEIKGGGGSGGGGSGGGGSEVQLVESGGGLVQPGGSLRLSCAASGFTFNIFEMNWVRQAPGKGLEWISYISSRGTTTYYADSVRGRFTISRDNAKNSLYLQMNSLRAEDTAVYYCARDYEATIPFDFWGQGTLVTVSSGGGGSGGGGSAHPGRPRAVPTQCDVPPNSRFDCAPDKAITQEQCEARGCCYIPAKQGLQGAQMGQPWCFFPPSYPSYKLENLSSSEMGYTATLTRTTPTFFPKDILTLRLDVMMETENRLHFTIKDPANRRYEVPLETPHVHSRAPSPLYSVEFSEEPFGVIVRRQLDGRVLLNTTVAPLFFADQFLQLSTSLPSQYITGLAEHLSPLMLSTSWTRITLWNRDLAPTPGANLYGSHPFYLALEDGGSAHGVFLLNSNAMDVVLQPSPALSWRSTGGILDVYIFLGPEPKSVVQQYLDVVGYPFMPPYWGLGFHLCRWGYSSTAITRQVVENMTRAHFPLDVQWNDLDYMDSRRDFTFNKDGFRDFPAMVQELHQGGRRYMMIVDPAISSSGPAGSYRPYDEGLRRGVFITNETGQPLIGKVWPGSTAFPDFTNPTALAWWEDMVAEFHDQVPFDGMWIDMNEPSNFIRGSEDGCPNNELENPPYVPGVVGGTLQAATICASSHQFLSTHYNLHNLYGLTEAIASHRALVKARGTRPFVISRSTFAGHGRYAGHWTGDVWSSWEQLASSVPEILQFNLLGVPLVGADVCGFLGNTSEELCVRWTQLGAFYPFMRNHNSLLSLPQEPYSFSEPAQQAMRKALTLRYALLPHLYTLFHQAHVAGETVARPLFLEFPKDSSTWTVDHQLLWGEALLITPVLQAGKAEVTGYFPLGTWYDLQTVPVEALGSLPPPPAAPREPAIHSEGQWVTLPAPLDTINVHLRAGYIIPLQGPGLTTTESRQQPMALAVALTKGGEARGELFWDDGESLEVLERGAYTQVIFLARNNTIVNELVRVTSEGAGLQLQKVTVLGVATAPQQVLSNGVPVSNFTYSPDTKVLDICVSLLMGEQFLVSWC

SEQ ID NO: 691 - protein, 1137 aa, synthetic construct
  REGION 1..1137: note = Synthetic
DIQMTQSPSSLSASVGDRVTITCRASQSISSYLNWYQQKPGKAPKLLIYAASSLQSGVPSRFSGSGSGTDFTLTISSLQPEDFATYYCQQSYSTPPITFGQGTRLEIKGGGGSGGGGSGGGGSEVQLVESGGGLVQPGRSLRLSCAASGFTFDDYAMNWVRQAPGKGLEWVSGISWSSGSMDYADSVKGRFTISRDNAKNSLYLQMNSLRTEDTALYYCAKAREVGDYYGMDVWGQGTTVTVSSGGGGSGGGGSAHPGRPRAVPTQCDVPPNSRFDCAPDKAITQEQCEARGCCYIPAKQGLQGAQMGQPWCFFPPSYPSYKLENLSSSEMGYTATLTRTTPTFFPKDILTLRLDVMMETENRLHFTIKDPANRRYEVPLETPHVHSRAPSPLYSVEFSEEPFGVIVRRQLDGRVLLNTTVAPLFFADQFLQLSTSLPSQYITGLAEHLSPLMLSTSWTRITLWNRDLAPTPGANLYGSHPFYLALEDGGSAHGVFLLNSNAMDVVLQPSPALSWRSTGGILDVYIFLGPEPKSVVQQYLDVVGYPFMPPYWGLGFHLCRWGYSSTAITRQVVENMTRAHFPLDVQWNDLDYMDSRRDFTFNKDGFRDFPAMVQELHQGGRRYMMIVDPAISSSGPAGSYRPYDEGLRRGVFITNETGQPLIGKVWPGSTAFPDFTNPTALAWWEDMVAEFHDQVPFDGMWIDMNEPSNFIRGSEDGCPNNELENPPYVPGVVGGTLQAATICASSHQFLSTHYNLHNLYGLTEAIASHRALVKARGTRPFVISRSTFAGHGRYAGHWTGDVWSSWEQLASSVPEILQFNLLGVPLVGADVCGFLGNTSEELCVRWTQLGAFYPFMRNHNSLLSLPQEPYSFSEPAQQAMRKALTLRYALLPHLYTLFHQAHVAGETVARPLFLEFPKDSSTWTVDHQLLWGEALLITPVLQAGKAEVTGYFPLGTWYDLQTVPVEALGSLPPPPAAPREPAIHSEGQWVTLPAPLDTINVHLRAGYIIPLQGPGLTTTESRQQPMALAVALTKGGEARGELFWDDGESLEVLERGAYTQVIFLARNNTIVNELVRVTSEGAGLQLQKVTVLGVATAPQQVLSNGVPVSNFTYSPDTKVLDICVSLLMGEQFLVSWC

SEQ ID NO: 692 - DNA, 3417 bp, synthetic construct
  misc_feature 1..3417: note = Synthetic
  source 1..3417: mol_type = other DNA
gacatccagatgacccagtctccatcttccgtgtctgcatctgtaggagacagagtcaccatcacttgtcgggcgagtcagggtattgccagctggttagcctggtatcagcagaaaccagggaaagcccctgagctcctgatctatgctgcatccagtttgcaaggtggggtcccatcaaggttcagcggcagtggatctgggacagatttcactctcaccatcagcagcctgcagcctgaagattttgcaatttactattgtcaacaggctaactatttcccgtggacgttcggccaagggaccaaggtggaaatcaaaggcggcggcggaagcggagggggaggatcaggaggaggcggatcccagatcaccttgaaggagtctggtcctacgctggtgaaacccacacagaccctcacgctgacctgcaccttctctgggttctcactcagcactagtggagtgggtgtggtctggatccgtcagccccccggaaaggccctggagtggcttgcactcatttattggaatgatcataagcggtacagcccatctctggggagcaggctcaccatcaccaaggacacctccaaaaaccaggtggtccttacaatgaccaacatggaccctgtggacacagccacatattactgtgcacactacagtgggagctattcctactactactatggtttggacgtctggggccaagggaccacggtcaccgtctcctcaggaggtggtggaagtggaggtggtggaagtgcacaccccggccgtcccagagcagtgcccacacagtgcgacgtcccccccaacagccgcttcgattgcgcccctgacaaggccatcacccaggaacagtgcgaggcccgcggctgttgctacatccctgcaaagcaggggctgcagggagcccagatggggcagccctggtgcttcttcccacccagctaccccagctacaagctggagaacctgagctcctctgaaatgggctacacggccaccctgacccgtaccacccccaccttcttccccaaggacatcctgaccctgcggctggacgtgatgatggagactgagaaccgcctccacttcacgatcaaagatccagctaacaggcgctacgaggtgcccttggagaccccgcatgtccacagccgggcaccgtccccactctacagcgtggagttctccgaggagcccttcggggtgatcgtgcgccggcagctggacggccgcgtgctgctgaacacgacggtggcgcccctgttctttgcggaccagttccttcagctgtccacctcgctgccctcgcagtatatcacaggcctcgccgagcacctcagtcccctgatgctcagcaccagctggaccaggatcaccctgtggaaccgggaccttgcgcccacgcccggtgcgaacctctacgggtctcaccctttctacctggcgctggaggacggcgggtcggcacacggggtgttcctgctaaacagcaatgccatggatgtggtcctgcagccgagccctgcccttagctggaggtcgacaggtgggatcctggatgtctacatcttcctgggcccagagcccaagagcgtggtgcagcagtacctggacgttgtgggatacccgttcatgccgccatactggggcctgggcttccacctgtgccgctggggctactcctccaccgctatcacccgccaggtggtggagaacatgaccagggcccacttccccctggacgtccagtggaacgacctggactacatggactcccggagggacttcacgttcaacaaggatggcttccgggacttcccggccatggtgcaggagctgcaccagggcggccggcgctacatgatgatcgtggatcctgccatcagcagctcgggccctgccgggagctacaggccctacgacgagggtctgcggaggggggttttcatcaccaacgagaccggccagccgctgattgggaaggtatggcccgggtccactgccttccccgacttcaccaaccccacagccctggcctggtgggaggacatggtggctgagttccatgaccaggtgcccttcgacggcatgtggattgacatgaacgagccttccaacttcatcaggggctctgaggacggctgccccaacaatgagctggagaacccaccctacgtgcctggggtggttggggggaccctccaggcggccaccatctgtgcctccagccaccagtttctctccacacactacaacctgcacaacctctacggcctgaccgaagccatcgcctcccacagggcgctggtgaaggctcgggggacacgcccatttgtgatctcccgctcgacctttgctggccacggccgatacgccggccactggacgggggacgtgtggagctcctgggagcagctcgcctcctccgtgccagaaatcctgcagtttaacctgctgggggtgcctctggtcggggccgacgtctgcggcttcctgggcaacacctcagaggagctgtgtgtgcgctggacccagctgggggccttctaccccttcatgcggaaccacaacagcctgctcagtctgccccaggagccgtacagcttcagcgagccggcccagcaggccatgaggaaggccctcaccctgcgctacgcactcctcccccacctctacacactgttccaccaggcccacgtcgcgggggagaccgtggcccggcccctcttcctggagttccccaaggactctagcacctggactgtggaccaccagctcctgtggggggaggccctgctcatcaccccagtgctccaggccgggaaggccgaagtgactggctacttccccttgggcacatggtacgacctgcagacggtgccagtagaggcccttggcagcctcccacccccacctgcagctccccgtgagccagccatccacagcgaggggcagtgggtgacgctgccggcccccctggacaccatcaacgtccacctccgggctgggtacatcatccccctgcagggccctggcctcacaaccacagagtcccgccagcagcccatggccctggctgtggccctgaccaagggtggggaggcccgaggggagctgttctgggacgatggagagagcctggaagtgctggagcgaggggcctacacacaggtcatcttcctggccaggaataacacgatcgtgaatgagctggtacgtgtgaccagtgagggagctggcctgcagctgcagaaggtgactgtcctgggcgtggccacggcgccccagcaggtcctctccaacggtgtccctgtctccaacttcacctacagccccgacaccaaggtcctggacatctgtgtctcgctgttgatgggagagcagtttctcgtcagctggtgt

SEQ ID NO: 693 - DNA, 3426 bp, synthetic construct
  misc_feature 1..3426: note = Synthetic
  source 1..3426: mol_type = other DNA
gacatccagatgacccagtctccatcctccctgtctgcatctgtaggagacagagtcaccatcacttgccgggcaagtcagagcattagcagctatttaaattggtatcagcagaaaccagggaaagcccctaagctcctgatctatgctgcatccagtttgcaaagtggggtcccgtcaaggttcagtggcagtggatctgggacagatttcactctcaccatcagcagtctgcaacctgaagattttgcaacttactactgtcaacagagttacagtacccctccgatcaccttcggccaagggacacgactggagattaaaggcggcggcggaagcggagggggaggatcaggaggaggcggatcccaggtgcagctggtggagtctgggggaggcgtggtccagcctggaaggtccctgagactctcctgcgcagcctctggattcccctttagtaattatgtcatgtattgggtccgccaggctccaggcaaggggctggagtgggtggctcttattttttttgacggaaagaaaaactatcatgcagactccgtgaagggccgattcaccataaccagagacaattccaaaaatatgttatatctgcaaatgaacagcctgagacctgaggacgcggctgtgtattactgtgcgaaaatccattgtcctaatggtgtatgttacaaggggtattacggaatggacgtctggggccaagggaccacggtcaccgtctcctcaggaggtggtggaagtggaggtggtggaagtgcacaccccggccgtcccagagcagtgcccacacagtgcgacgtcccccccaacagccgcttcgattgcgcccctgacaaggccatcacccaggaacagtgcgaggcccgcggctgttgctacatccctgcaaagcaggggctgcagggagcccagatggggcagccctggtgcttcttcccacccagctaccccagctacaagctggagaacctgagctcctctgaaatgggctacacggccaccctgacccgtaccacccccaccttcttccccaaggacatcctgaccctgcggctggacgtgatgatggagactgagaaccgcctccacttcacgatcaaagatccagctaacaggcgctacgaggtgcccttggagaccccgcatgtccacagccgggcaccgtccccactctacagcgtggagttctccgaggagcccttcggggtgatcgtgcgccggcagctggacggccgcgtgctgctgaacacgacggtggcgcccctgttctttgcggaccagttccttcagctgtccacctcgctgccctcgcagtatatcacaggcctcgccgagcacctcagtcccctgatgctcagcaccagctggaccaggatcaccctgtggaaccgggaccttgcgcccacgcccggtgcgaacctctacgggtctcaccctttctacctggcgctggaggacggcgggtcggcacacggggtgttcctgctaaacagcaatgccatggatgtggtcctgcagccgagccctgcccttagctggaggtcgacaggtgggatcctggatgtctacatcttcctgggcccagagcccaagagcgtggtgcagcagtacctggacgttgtgggatacccgttcatgccgccatactggggcctgggcttccacctgtgccgctggggctactcctccaccgctatcacccgccaggtggtggagaacatgaccagggcccacttccccctggacgtccagtggaacgacctggactacatggactcccggagggacttcacgttcaacaaggatggcttccgggacttcccggccatggtgcaggagctgcaccagggcggccggcgctacatgatgatcgtggatcctgccatcagcagctcgggccctgccgggagctacaggccctacgacgagggtctgcggaggggggttttcatcaccaacgagaccggccagccgctgattgggaaggtatggcccgggtccactgccttccccgacttcaccaaccccacagccctggcctggtgggaggacatggtggctgagttccatgaccaggtgcccttcgacggcatgtggattgacatgaacgagccttccaacttcatcaggggctctgaggacggctgccccaacaatgagctggagaacccaccctacgtgcctggggtggttggggggaccctccaggcggccaccatctgtgcctccagccaccagtttctctccacacactacaacctgcacaacctctacggcctgaccgaagccatcgcctcccacagggcgctggtgaaggctcgggggacacgcccatttgtgatctcccgctcgacctttgctggccacggccgatacgccggccactggacgggggacgtgtggagctcctgggagcagctcgcctcctccgtgccagaaatcctgcagtttaacctgctgggggtgcctctggtcggggccgacgtctgcggcttcctgggcaacacctcagaggagctgtgtgtgcgctggacccagctgggggccttctaccccttcatgcggaaccacaacagcctgctcagtctgccccaggagccgtacagcttcagcgagccggcccagcaggccatgaggaaggccctcaccctgcgctacgcactcctcccccacctctacacactgttccaccaggcccacgtcgcgggggagaccgtggcccggcccctcttcctggagttccccaaggactctagcacctggactgtggaccaccagctcctgtggggggaggccctgctcatcaccccagtgctccaggccgggaaggccgaagtgactggctacttccccttgggcacatggtacgacctgcagacggtgccagtagaggcccttggcagcctcccacccccacctgcagctccccgtgagccagccatccacagcgaggggcagtgggtgacgctgccggcccccctggacaccatcaacgtccacctccgggctgggtacatcatccccctgcagggccctggcctcacaaccacagagtcccgccagcagcccatggccctggctgtggccctgaccaagggtggggaggcccgaggggagctgttctgggacgatggagagagcctggaagtgctggagcgaggggcctacacacaggtcatcttcctggccaggaataacacgatcgtgaatgagctggtacgtgtgaccagtgagggagctggcctgcagctgcagaaggtgactgtcctgggcgtggccacggcgccccagcaggtcctctccaacggtgtccctgtctccaacttcacctacagccccgacaccaaggtcctggacatctgtgtctcgctgttgatgggagagcagtttctcgtcagctggtgt

SEQ ID NO: 694 - DNA, 3405 bp, synthetic construct
  misc_feature 1..3405: note = Synthetic
  source 1..3405: mol_type = other DNA
gacatccagatgacccagtctccatcctccctgtctgcatctgtaggagacagagtcaccatcacttgccgggcaagtcagagcattagcagctatttaaattggtatcagcagaaaccagggaaagcccctaagctcctgatctatgctgcatccagtttgcaaagtggggtcccgtcaaggttcagtggcagtggatctgggacagatttcactctcaccatcagcagtctgcaacctgaagattttgcaacttactactgtcaacagagttacagtacccctccgatcaccttcggccaagggacacgactggagattaaaggcggcggcggaagcggagggggaggatcaggaggaggcggatccgaggtgcagctggtggagtctgggggaggcttagtacagcctggagggtccctaagactctcctgtgcagcctctggattcaccttcaatatttttgaaatgaactgggtccgccaggctccagggaaggggctggagtggatttcctacattagtagtcgtggaactaccacatactacgcagactctgtgaggggccgattcaccatctccagagacaacgccaagaactcactgtatctgcaaatgaacagcctgagagccgaggacacggctgtttattactgtgcgagagattatgaagcaacaatcccttttgacttctggggccagggaaccctggtcaccgtctcctcaggaggtggtggaagtggaggtggtggaagtgcacaccccggccgtcccagagcagtgcccacacagtgcgacgtcccccccaacagccgcttcgattgcgcccctgacaaggccatcacccaggaacagtgcgaggcccgcggctgttgctacatccctgcaaagcaggggctgcagggagcccagatggggcagccctggtgcttcttcccacccagctaccccagctacaagctggagaacctgagctcctctgaaatgggctacacggccaccctgacccgtaccacccccaccttcttccccaaggacatcctgaccctgcggctggacgtgatgatggagactgagaaccgcctccacttcacgatcaaagatccagctaacaggcgctacgaggtgcccttggagaccccgcatgtccacagccgggcaccgtccccactctacagcgtggagttctccgaggagcccttcggggtgatcgtgcgccggcagctggacggccgcgtgctgctgaacacgacggtggcgcccctgttctttgcggaccagttccttcagctgtccacctcgctgccctcgcagtatatcacaggcctcgccgagcacctcagtcccctgatgctcagcaccagctggaccaggatcaccctgtggaaccgggaccttgcgcccacgcccggtgcgaacctctacgggtctcaccctttctacctggcgctggaggacggcgggtcggcacacggggtgttcctgctaaacagcaatgccatggatgtggtcctgcagccgagccctgcccttagctggaggtcgacaggtgggatcctggatgtctacatcttcctgggcccagagcccaagagcgtggtgcagcagtacctggacgttgtgggatacccgttcatgccgccatactggggcctgggcttccacctgtgccgctggggctactcctccaccgctatcacccgccaggtggtggagaacatgaccagggcccacttccccctggacgtccagtggaacgacctggactacatggactcccggagggacttcacgttcaacaaggatggcttccgggacttcccggccatggtgcaggagctgcaccagggcggccggcgctacatgatgatcgtggatcctgccatcagcagctcgggccctgccgggagctacaggccctacgacgagggtctgcggaggggggttttcatcaccaacgagaccggccagccgctgattgggaaggtatggcccgggtccactgccttccccgacttcaccaaccccacagccctggcctggtgggaggacatggtggctgagttccatgaccaggtgcccttcgacggcatgtggattgacatgaacgagccttccaacttcatcaggggctctgaggacggctgccccaacaatgagctggagaacccaccctacgtgcctggggtggttggggggaccctccaggcggccaccatctgtgcctccagccaccagtttctctccacacactacaacctgcacaacctctacggcctgaccgaagccatcgcctcccacagggcgctggtgaaggctcgggggacacgcccatttgtgatctcccgctcgacctttgctggccacggccgatacgccggccactggacgggggacgtgtggagctcctgggagcagctcgcctcctccgtgccagaaatcctgcagtttaacctgctgggggtgcctctggtcggggccgacgtctgcggcttcctgggcaacacctcagaggagctgtgtgtgcgctggacccagctgggggccttctaccccttcatgcggaaccacaacagcctgctcagtctgccccaggagccgtacagcttcagcgagccggcccagcaggccatgaggaaggccctcaccctgcgctacgcactcctcccccacctctacacactgttccaccaggcccacgtcgcgggggagaccgtggcccggcccctcttcctggagttccccaaggactctagcacctggactgtggaccaccagctcctgtggggggaggccctgctcatcaccccagtgctccaggccgggaaggccgaagtgactggctacttccccttgggcacatggtacgacctgcagacggtgccagtagaggcccttggcagcctcccacccccacctgcagctccccgtgagccagccatccacagcgaggggcagtgggtgacgctgccggcccccctggacaccatcaacgtccacctccgggctgggtacatcatccccctgcagggccctggcctcacaaccacagagtcccgccagcagcccatggccctggctgtggccctgaccaagggtggggaggcccgaggggagctgttctgggacgatggagagagcctggaagtgctggagcgaggggcctacacacaggtcatcttcctggccaggaataacacgatcgtgaatgagctggtacgtgtgaccagtgagggagctggcctgcagctgcagaaggtgactgtcctgggcgtggccacggcgccccagcaggtcctctccaacggtgtccctgtctccaacttcacctacagccccgacaccaaggtcctggacatctgtgtctcgctgttgatgggagagcagtttctcgtcagctggtgt

SEQ ID NO: 695 - DNA, 3411 bp, synthetic construct
  misc_feature 1..3411: note = Synthetic
  source 1..3411: mol_type = other DNA
gacatccagatgacccagtctccatcctccctgtctgcatctgtaggagacagagtcaccatcacttgccgggcaagtcagagcattagcagctatttaaattggtatcagcagaaaccagggaaagcccctaagctcctgatctatgctgcatccagtttgcaaagtggggtcccgtcaaggttcagtggcagtggatctgggacagatttcactctcaccatcagcagtctgcaacctgaagattttgcaacttactactgtcaacagagttacagtacccctccgatcaccttcggccaagggacacgactggagattaaaggcggcggcggaagcggagggggaggatcaggaggaggcggatccgaagtgcagctggtggagtctgggggaggcttggttcagcctggcaggtccctgagactctcctgtgcagcctctggattcacctttgatgattatgccatgaactgggtccggcaagctccagggaagggcctggagtgggtctcaggtattagttggagtagtggtagcatggactatgcggactctgtgaagggccgattcaccatctccagagacaacgccaaaaactccctgtatctgcaaatgaacagtctgagaactgaggacacggccttatattactgtgcaaaagctagggaagttggagactactacggtatggacgtctggggccaagggaccacggtcaccgtctcctcaggaggtggtggaagtggaggtggtggaagtgcacaccccggccgtcccagagcagtgcccacacagtgcgacgtcccccccaacagccgcttcgattgcgcccctgacaaggccatcacccaggaacagtgcgaggcccgcggctgttgctacatccctgcaaagcaggggctgcagggagcccagatggggcagccctggtgcttcttcccacccagctaccccagctacaagctggagaacctgagctcctctgaaatgggctacacggccaccctgacccgtaccacccccaccttcttccccaaggacatcctgaccctgcggctggacgtgatgatggagactgagaaccgcctccacttcacgatcaaagatccagctaacaggcgctacgaggtgcccttggagaccccgcatgtccacagccgggcaccgtccccactctacagcgtggagttctccgaggagcccttcggggtgatcgtgcgccggcagctggacggccgcgtgctgctgaacacgacggtggcgcccctgttctttgcggaccagttccttcagctgtccacctcgctgccctcgcagtatatcacaggcctcgccgagcacctcagtcccctgatgctcagcaccagctggaccaggatcaccctgtggaaccgggaccttgcgcccacgcccggtgcgaacctctacgggtctcaccctttctacctggcgctggaggacggcgggtcggcacacggggtgttcctgctaaacagcaatgccatggatgtggtcctgcagccgagccctgcccttagctggaggtcgacaggtgggatcctggatgtctacatcttcctgggcccagagcccaagagcgtggtgcagcagtacctggacgttgtgggatacccgttcatgccgccatactggggcctgggcttccacctgtgccgctggggctactcctccaccgctatcacccgccaggtggtggagaacatgaccagggcccacttccccctggacgtccagtggaacgacctggactacatggactcccggagggacttcacgttcaacaaggatggcttccgggacttcccggccatggtgcaggagctgcaccagggcggccggcgctacatgatgatcgtggatcctgccatcagcagctcgggccctgccgggagctacaggccctacgacgagggtctgcggaggggggttttcatcaccaacgagaccggccagccgctgattgggaaggtatggcccgggtccactgccttccccgacttcaccaaccccacagccctggcctggtgggaggacatggtggctgagttccatgaccaggtgcccttcgacggcatgtggattgacatgaacgagccttccaacttcatcaggggctctgaggacggctgccccaacaatgagctggagaacccaccctacgtgcctggggtggttggggggaccctccaggcggccaccatctgtgcctccagccaccagtttctctccacacactacaacctgcacaacctctacggcctgaccgaagccatcgcctcccacagggcgctggtgaaggctcgggggacacgcccatttgtgatctcccgctcgacctttgctggccacggccgatacgccggccactggacgggggacgtgtggagctcctgggagcagctcgcctcctccgtgccagaaatcctgcagtttaacctgctgggggtgcctctggtcggggccgacgtctgcggcttcctgggcaacacctcagaggagctgtgtgtgcgctggacccagctgggggccttctaccccttcatgcggaaccacaacagcctgctcagtctgccccaggagccgtacagcttcagcgagccggcccagcaggccatgaggaaggccctcaccctgcgctacgcactcctcccccacctctacacactgttccaccaggcccacgtcgcgggggagaccgtggcccggcccctcttcctggagttccccaaggactctagcacctggactgtggaccaccagctcctgtggggggaggccctgctcatcaccccagtgctccaggccgggaaggccgaagtgactggctacttccccttgggcacatggtacgacctgcagacggtgccagtagaggcccttggcagcctcccacccccacctgcagctccccgtgagccagccatccacagcgaggggcagtgggtgacgctgccggcccccctggacaccatcaacgtccacctccgggctgggtacatcatccccctgcagggccctggcctcacaaccacagagtcccgccagcagcccatggccctggctgtggccctgaccaagggtggggaggcccgaggggagctgttctgggacgatggagagagcctggaagtgctggagcgaggggcctacacacaggtcatcttcctggccaggaataacacgatcgtgaatgagctggtacgtgtgaccagtgagggagctggcctgcagctgcagaaggtgactgtcctgggcgtggccacggcgccccagcaggtcctctccaacggtgtccctgtctccaacttcacctacagccccgacaccaaggtcctggacatctgtgtctcgctgttgatgggagagcagtttctcgtcagctggtgt

SEQ ID NO: 696 - DNA, 3417 bp, synthetic construct
  misc_feature 1..3417: note = Synthetic
  source 1..3417: mol_type = other DNA
gacatccagatgacacagagcccatcctctgtgtctgcctctgtgggagacagagtgaccatcacctgtagagccagccagggcattgcttcttggctggcctggtatcagcagaagcctggaaaggcccctgagctgctgatctatgctgccagctctctgcaaggtggtgtccccagcagattcagtggcagtggctctggcacagacttcaccctgaccataagcagcctgcagcctgaggactttgccatctactactgccagcaggccaactacttcccctggacatttggccagggcaccaaggtggaaatcaaaggtggtggtggaagtggtggtggtggcagtggtggtggtggaagccagatcaccctgaaagagtctggccccacactggtcaagcccacacagaccctgacactgacctgcaccttctctggcttcagcctgagcaccagtggtgttggagttgtgtggatcagacagcctcctggcaaggccctggaatggctggcactgatctactggaatgaccacaagagatacagccccagcctgggcagcagactgacaatcaccaaggacaccagcaagaaccaggtggtgctgaccatgaccaacatggaccctgtggacacagccacctactattgtgcccactactctggcagctacagctactactactatggcctggatgtgtggggacagggcacaacagtgacagtgtccagtggtggtggtggcagtggtggtggaggatctgcccatcctggcagacctagagctgtgcccacacagtgtgatgtgcctccaaacagcagatttgactgtgcccctgacaaggccatcacacaagagcagtgtgaagccagaggctgctgttacatccctgccaagcaaggactgcaaggggctcagatgggacagccctggtgcttcttcccaccatcttaccccagctacaagctggaaaacctgagcagctctgagatgggctacactgctacactgaccagaaccacacctacattcttcccaaaggacatcctgacactgaggctggatgtgatgatggaaacagagaacaggctgcacttcaccatcaaggaccctgccaatagaagatatgaggtgcccctggaaacccctcatgtgcactctagagccccatctccactgtactctgtggaattttctgaggaaccctttggggtcatagtcagaaggcagctggatggcagagtgctgctgaacacaactgtggcccctctgttctttgctgatcagttcctgcagctgagcaccagcctgcctagccagtatatcacaggcctggcagagcacctgtctccactgatgctgagcacatcctggaccagaatcaccctgtggaacagagacctggctcccacacctggggccaacctgtatggctctcaccccttctatctggccctggaagatggtggttcagcccatggtgtctttctgctgaactccaatgccatggatgtggtgctgcagccctctcctgctctgtcttggagaagcactggtggcatcctggatgtgtacatctttctgggccctgagcctaagtctgtggtgcagcagtacctggatgttgtgggctaccccttcatgcctccttattggggcctgggcttccacctgtgcagatggggatacagcagcacagccatcaccagacaggttgtggaaaacatgaccagagcacacttcccactggatgtgcagtggaatgacctggactacatggacagcagaagggacttcaccttcaacaaggatggcttcagagacttccctgccatggtgcaagagctgcaccaaggtggtagaagatatatgatgattgtggacccagccatcagctcctctggaccagctggcagctacagaccctatgatgagggactgagaagaggggtgttcatcaccaatgagacaggccagcctctgattggcaaagtgtggccaggctccacagcctttccagatttcacaaaccccacagctctggcttggtgggaagatatggtggcagagttccatgatcaggtgccctttgatggcatgtggattgacatgaatgagcccagcaacttcatcaggggctctgaggatggatgccccaacaatgaactggaaaatcctccttatgtgcctggtgttgttggagggacactgcaggcagccacaatttgtgccagctctcaccagtttctgagcacccactacaacctgcacaatctgtatggcctgactgaggccattgccagccacagggctcttgtgaaggctagaggcaccagaccttttgtgatcagcaggtccacctttgctggccatggcagatatgctggccactggactggggatgtgtggtctagttgggagcagctggctagctctgtgcctgagatcctgcagttcaacctgctgggagtgccccttgttggagcagatgtgtgtggcttcctgggcaacacctcagaggaactgtgtgtcagatggactcagctgggagcattctaccctttcatgagaaaccacaacagcctgctgagcctgcctcaagagccttacagcttttctgagccagcacagcaggccatgagaaaggccctgactctgagatatgccctgctgcctcacctgtacaccctgttccatcaggctcatgtggctggggagactgtggctagacccctgttcctggaattccccaaggacagctccacctggacagtggatcatcagctgctgtggggagaagccctgctgattacacctgtgctgcaggctggcaaggctgaagtgacaggctacttccctcttggcacttggtatgacctgcagacagtgcctgtggaagctctgggatctctgcctccacctcctgctgctcctagagagcctgccattcactctgaaggccagtgggttaccctgcctgctccactggataccatcaatgtgcatctgagagcaggctacatcatccctctgcaaggccctggcctgaccaccacagaatctagacagcagccaatggcactggctgtggccctgaccaaaggtggagaagctagaggggagctgttctgggatgatggggagagcctggaagtgctggaaagaggggcctatacacaagtgatttttctggctaggaacaataccattgtgaatgagcttgtcagagtcacctctgaaggtgctggcctgcagctccagaaagtgacagtgcttggagtggccacagcaccccagcaagtgctgtctaatggggtgccagtgtccaacttcacatacagccctgataccaaggtcctggacatctgtgtgtccctgcttatgggagagcagttcctggtgtcttggtgc

SEQ ID NO: 697 - DNA, 3417 bp, synthetic construct
  misc_feature 1..3417: note = Synthetic
  source 1..3417: mol_type = other DNA
gacatccagatgacccagagcccaagctctgtgtctgcctcagtgggagacagagtgacaatcacctgcagagccagccagggcattgccagctggctggcctggtaccagcagaagcctggcaaagctcctgaactcctgatctatgctgccagcagcctgcagggtggggtgcctagcaggttctctggctcaggctctggcacagacttcaccctgacaatcagcagcctgcagcctgaggactttgctatctactactgccagcaggccaactacttcccctggacctttggccaaggcaccaaggtggagatcaagggaggaggaggctctggtggaggtggctctgggggagggggcagccagatcaccctgaaggagagtggccctacactggttaagcccacccagacactgacactgacctgcaccttctctggcttcagcctgagcaccagtggagtgggagtggtgtggatcagacagccccctggcaaggccctggaatggctggccctgatctactggaatgatcacaagagatacagccctagcctgggctccagactgaccatcaccaaggacaccagcaaaaaccaggtggtgctgaccatgaccaacatggatccagtggacacagccacctactactgtgcccactactctggcagctacagctactactactatggcctggatgtctggggccaaggcaccacagtcacagtgtccagtgggggtggaggctctggaggaggaggcagtgcccatcctggcagacctagagctgtgcccacacagtgtgatgtgcctccaaacagcagatttgactgtgcccctgacaaggccatcacacaagagcagtgtgaagccagaggctgctgttacatccctgccaagcaaggactgcaaggggctcagatgggacagccctggtgcttcttcccaccatcttaccccagctacaagctggaaaacctgagcagctctgagatgggctacactgctacactgaccagaaccacacctacattcttcccaaaggacatcctgacactgaggctggatgtgatgatggaaacagagaacaggctgcacttcaccatcaaggaccctgccaatagaagatatgaggtgcccctggaaacccctcatgtgcactctagagccccatctccactgtactctgtggaattttctgaggaaccctttggggtcatagtcagaaggcagctggatggcagagtgctgctgaacacaactgtggcccctctgttctttgctgatcagttcctgcagctgagcaccagcctgcctagccagtatatcacaggcctggcagagcacctgtctccactgatgctgagcacatcctggaccagaatcaccctgtggaacagagacctggctcccacacctggggccaacctgtatggctctcaccccttctatctggccctggaagatggtggttcagcccatggtgtctttctgctgaactccaatgccatggatgtggtgctgcagccctctcctgctctgtcttggagaagcactggtggcatcctggatgtgtacatctttctgggccctgagcctaagtctgtggtgcagcagtacctggatgttgtgggctaccccttcatgcctccttattggggcctgggcttccacctgtgcagatggggatacagcagcacagccatcaccagacaggttgtggaaaacatgaccagagcacacttcccactggatgtgcagtggaatgacctggactacatggacagcagaagggacttcaccttcaacaaggatggcttcagagacttccctgccatggtgcaagagctgcaccaaggtggtagaagatatatgatgattgtggacccagccatcagctcctctggaccagctggcagctacagaccctatgatgagggactgagaagaggggtgttcatcaccaatgagacaggccagcctctgattggcaaagtgtggccaggctccacagcctttccagatttcacaaaccccacagctctggcttggtgggaagatatggtggcagagttccatgatcaggtgccctttgatggcatgtggattgacatgaatgagcccagcaacttcatcaggggctctgaggatggatgccccaacaatgaactggaaaatcctccttatgtgcctggtgttgttggagggacactgcaggcagccacaatttgtgccagctctcaccagtttctgagcacccactacaacctgcacaatctgtatggcctgactgaggccattgccagccacagggctcttgtgaaggctagaggcaccagaccttttgtgatcagcaggtccacctttgctggccatggcagatatgctggccactggactggggatgtgtggtctagttgggagcagctggctagctctgtgcctgagatcctgcagttcaacctgctgggagtgccccttgttggagcagatgtgtgtggcttcctgggcaacacctcagaggaactgtgtgtcagatggactcagctgggagcattctaccctttcatgagaaaccacaacagcctgctgagcctgcctcaagagccttacagcttttctgagccagcacagcaggccatgagaaaggccctgactctgagatatgccctgctgcctcacctgtacaccctgttccatcaggctcatgtggctggggagactgtggctagacccctgttcctggaattccccaaggacagctccacctggacagtggatcatcagctgctgtggggagaagccctgctgattacacctgtgctgcaggctggcaaggctgaagtgacaggctacttccctcttggcacttggtatgacctgcagacagtgcctgtggaagctctgggatctctgcctccacctcctgctgctcctagagagcctgccattcactctgaaggccagtgggttaccctgcctgctccactggataccatcaatgtgcatctgagagcaggctacatcatccctctgcaaggccctggcctgaccaccacagaatctagacagcagccaatggcactggctgtggccctgaccaaaggtggagaagctagaggggagctgttctgggatgatggggagagcctggaagtgctggaaagaggggcctatacacaagtgatttttctggctaggaacaataccattgtgaatgagcttgtcagagtcacctctgaaggtgctggcctgcagctccagaaagtgacagtgcttggagtggccacagcaccccagcaagtgctgtctaatggggtgccagtgtccaacttcacatacagccctgataccaaggtcctggacatctgtgtgtccctgcttatgggagagcagttcctggtgtcttggtgc

SEQ ID NO: 698 - DNA, 3417 bp, synthetic construct
  misc_feature 1..3417: note = Synthetic
  source 1..3417: mol_type = other DNA
gatatccagatgacacaaagcccttcctctgtgtctgcttcagtgggagacagagtcacaatcacatgcagagccagccagggcattgccagctggctggcctggtaccagcagaagcctggcaaagccccagaactgctgatctatgctgccagcagcctccagggtggggtgcccagcagattctctggctctggctctggcacagacttcaccctgaccatcagcagcctgcagccagaggactttgccatctactactgccagcaggccaactacttcccctggacctttggccagggcaccaaggtggaaatcaaggggggaggaggctctggaggaggaggcagtggtggaggaggcagccagatcaccctgaaggagtctggccctaccctggtgaagcctacccagaccctgaccctgacctgcaccttctctggcttcagcctgagcacaagtggtgtgggagtggtgtggatcagacaaccccctggcaaggctctggagtggctggccctgatctactggaatgaccacaagagatacagccctagcctgggcagcaggctgaccatcaccaaagataccagcaagaaccaggtggtgctgaccatgaccaacatggaccctgttgacacagccacatactactgtgcccactacagtggcagctacagctactactactatggcctggatgtctggggccagggcaccacagtgacagtgtcctcagggggtggaggctctgggggaggaggcagtgcccatcctggcagacctagagctgtgcccacacagtgtgatgtgcctccaaacagcagatttgactgtgcccctgacaaggccatcacacaagagcagtgtgaagccagaggctgctgttacatccctgccaagcaaggactgcaaggggctcagatgggacagccctggtgcttcttcccaccatcttaccccagctacaagctggaaaacctgagcagctctgagatgggctacactgctacactgaccagaaccacacctacattcttcccaaaggacatcctgacactgaggctggatgtgatgatggaaacagagaacaggctgcacttcaccatcaaggaccctgccaatagaagatatgaggtgcccctggaaacccctcatgtgcactctagagccccatctccactgtactctgtggaattttctgaggaaccctttggggtcatagtcagaaggcagctggatggcagagtgctgctgaacacaactgtggcccctctgttctttgctgatcagttcctgcagctgagcaccagcctgcctagccagtatatcacaggcctggcagagcacctgtctccactgatgctgagcacatcctggaccagaatcaccctgtggaacagagacctggctcccacacctggggccaacctgtatggctctcaccccttctatctggccctggaagatggtggttcagcccatggtgtctttctgctgaactccaatgccatggatgtggtgctgcagccctctcctgctctgtcttggagaagcactggtggcatcctggatgtgtacatctttctgggccctgagcctaagtctgtggtgcagcagtacctggatgttgtgggctaccccttcatgcctccttattggggcctgggcttccacctgtgcagatggggatacagcagcacagccatcaccagacaggttgtggaaaacatgaccagagcacacttcccactggatgtgcagtggaatgacctggactacatggacagcagaagggacttcaccttcaacaaggatggcttcagagacttccctgccatggtgcaagagctgcaccaaggtggtagaagatatatgatgattgtggacccagccatcagctcctctggaccagctggcagctacagaccctatgatgagggactgagaagaggggtgttcatcaccaatgagacaggccagcctctgattggcaaagtgtggccaggctccacagcctttccagatttcacaaaccccacagctctggcttggtgggaagatatggtggcagagttccatgatcaggtgccctttgatggcatgtggattgacatgaatgagcccagcaacttcatcaggggctctgaggatggatgccccaacaatgaactggaaaatcctccttatgtgcctggtgttgttggagggacactgcaggcagccacaatttgtgccagctctcaccagtttctgagcacccactacaacctgcacaatctgtatggcctgactgaggccattgccagccacagggctcttgtgaaggctagaggcaccagaccttttgtgatcagcaggtccacctttgctggccatggcagatatgctggccactggactggggatgtgtggtctagttgggagcagctggctagctctgtgcctgagatcctgcagttcaacctgctgggagtgccccttgttggagcagatgtgtgtggcttcctgggcaacacctcagaggaactgtgtgtcagatggactcagctgggagcattctaccctttcatgagaaaccacaacagcctgctgagcctgcctcaagagccttacagcttttctgagccagcacagcaggccatgagaaaggccctgactctgagatatgccctgctgcctcacctgtacaccctgttccatcaggctcatgtggctggggagactgtggctagacccctgttcctggaattccccaaggacagctccacctggacagtggatcatcagctgctgtggggagaagccctgctgattacacctgtgctgcaggctggcaaggctgaagtgacaggctacttccctcttggcacttggtatgacctgcagacagtgcctgtggaagctctgggatctctgcctccacctcctgctgctcctagagagcctgccattcactctgaaggccagtgggttaccctgcctgctccactggataccatcaatgtgcatctgagagcaggctacatcatccctctgcaaggccctggcctgaccaccacagaatctagacagcagccaatggcactggctgtggccctgaccaaaggtggagaagctagaggggagctgttctgggatgatggggagagcctggaagtgctggaaagaggggcctatacacaagtgatttttctggctaggaacaataccattgtgaatgagcttgtcagagtcacctctgaaggtgctggcctgcagctccagaaagtgacagtgcttggagtggccacagcaccccagcaagtgctgtctaatggggtgccagtgtccaacttcacatacagccctgataccaaggtcctggacatctgtgtgtccctgcttatgggagagcagttcctggtgtcttggtgc

SEQ ID NO: 699 - DNA, 3405 bp, synthetic construct
  misc_feature 1..3405: note = Synthetic
  source 1..3405: mol_type = other DNA
gacatccagatgacacagagcccctctagcctgtctgcctctgtgggagacagagtgaccatcacctgtagagccagccagagcatcagcagctacctgaactggtatcagcagaagcctggcaaggcccctaaactgctgatctatgctgccagcagcctgcagtctggggtgccctctagattttctggcagtggctctggcacagacttcaccctgaccataagctccctgcagcctgaggactttgccacctactactgtcagcagagctacagcacccctcctatcacctttggccagggcaccagactggaaatcaaaggtggtggtggaagtggtggtggtggcagtggtggtggtggatctgaagtgcagctggtggaaagtggtggtggcctggttcagcctggtggctctctgagactgagctgtgcagcctctggcttcaccttcaacatctttgagatgaactgggtcagacaggccccaggcaaaggcctggaatggatcagctacatcagctccagaggcaccacaacctactatgctgactctgtcagaggcaggttcaccatcagcagagacaatgccaagaacagcctgtacctgcagatgaactccctgagagctgaggacacagcagtgtactactgtgccagggactatgaggctacaatcccctttgacttctggggccagggaaccctggtcacagttagcagtggtggtggtggtagtggtggtggtggctctgcccatcctggcagacctagagctgtgcccacacagtgtgatgtgcctccaaacagcagatttgactgtgcccctgacaaggccatcacacaagagcagtgtgaagccagaggctgctgttacatccctgccaagcaaggactgcaaggggctcagatgggacagccctggtgcttcttcccaccatcttaccccagctacaagctggaaaacctgagcagctctgagatgggctacactgctacactgaccagaaccacacctacattcttcccaaaggacatcctgacactgaggctggatgtgatgatggaaacagagaacaggctgcacttcaccatcaaggaccctgccaatagaagatatgaggtgcccctggaaacccctcatgtgcactctagagccccatctccactgtactctgtggaattttctgaggaaccctttggggtcatagtcagaaggcagctggatggcagagtgctgctgaacacaactgtggcccctctgttctttgctgatcagttcctgcagctgagcaccagcctgcctagccagtatatcacaggcctggcagagcacctgtctccactgatgctgagcacatcctggaccagaatcaccctgtggaacagagacctggctcccacacctggggccaacctgtatggctctcaccccttctatctggccctggaagatggtggttcagcccatggtgtctttctgctgaactccaatgccatggatgtggtgctgcagccctctcctgctctgtcttggagaagcactggtggcatcctggatgtgtacatctttctgggccctgagcctaagtctgtggtgcagcagtacctggatgttgtgggctaccccttcatgcctccttattggggcctgggcttccacctgtgcagatggggatacagcagcacagccatcaccagacaggttgtggaaaacatgaccagagcacacttcccactggatgtgcagtggaatgacctggactacatggacagcagaagggacttcaccttcaacaaggatggcttcagagacttccctgccatggtgcaagagctgcaccaaggtggtagaagatatatgatgattgtggacccagccatcagctcctctggaccagctggcagctacagaccctatgatgagggactgagaagaggggtgttcatcaccaatgagacaggccagcctctgattggcaaagtgtggccaggctccacagcctttccagatttcacaaaccccacagctctggcttggtgggaagatatggtggcagagttccatgatcaggtgccctttgatggcatgtggattgacatgaatgagcccagcaacttcatcaggggctctgaggatggatgccccaacaatgaactggaaaatcctccttatgtgcctggtgttgttggagggacactgcaggcagccacaatttgtgccagctctcaccagtttctgagcacccactacaacctgcacaatctgtatggcctgactgaggccattgccagccacagggctcttgtgaaggctagaggcaccagaccttttgtgatcagcaggtccacctttgctggccatggcagatatgctggccactggactggggatgtgtggtctagttgggagcagctggctagctctgtgcctgagatcctgcagttcaacctgctgggagtgccccttgttggagcagatgtgtgtggcttcctgggcaacacctcagaggaactgtgtgtcagatggactcagctgggagcattctaccctttcatgagaaaccacaacagcctgctgagcctgcctcaagagccttacagcttttctgagccagcacagcaggccatgagaaaggccctgactctgagatatgccctgctgcctcacctgtacaccctgttccatcaggctcatgtggctggggagactgtggctagacccctgttcctggaattccccaaggacagctccacctggacagtggatcatcagctgctgtggggagaagccctgctgattacacctgtgctgcaggctggcaaggctgaagtgacaggctacttccctcttggcacttggtatgacctgcagacagtgcctgtggaagctctgggatctctgcctccacctcctgctgctcctagagagcctgccattcactctgaaggccagtgggttaccctgcctgctccactggataccatcaatgtgcatctgagagcaggctacatcatccctctgcaaggccctggcctgaccaccacagaatctagacagcagccaatggcactggctgtggccctgaccaaaggtggagaagctagaggggagctgttctgggatgatggggagagcctggaagtgctggaaagaggggcctatacacaagtgatttttctggctaggaacaataccattgtgaatgagcttgtcagagtcacctctgaaggtgctggcctgcagctccagaaagtgacagtgcttggagtggccacagcaccccagcaagtgctgtctaatggggtgccagtgtccaacttcacatacagccctgataccaaggtcctggacatctgtgtgtccctgcttatgggagagcagttcctggtgtcttggtgc

SEQ ID NO: 700 - DNA, 3405 bp, synthetic construct
  misc_feature 1..3405: note = Synthetic
  source 1..3405: mol_type = other DNA
gacatccagatgacccagagccccagcagcctgtctgcctctgtgggtgacagggtgaccattacctgcagagccagccaaagcatcagcagctacctgaactggtaccagcagaagccaggcaaggcccctaagctgctgatctatgctgccagcagcctgcaatctggagtgcctagcagattcagtggctctggctcaggcacagacttcaccctgaccatctccagcctccagcctgaggattttgccacctactactgccagcagagctacagcaccccccctatcacctttggccagggcaccagactggaaatcaagggaggaggaggctctggaggaggaggctctggagggggaggctctgaggtgcagctggtggagtctgggggaggcctggtgcagcctggaggctccctgaggctgagctgtgctgcctcaggcttcaccttcaacatctttgaaatgaactgggtcagacaggcccctggcaaaggcctggaatggatcagctacatcagcagcagaggcacaacaacatactatgctgactctgtgagaggcaggttcacaatcagcagagacaatgccaagaacagcctgtacctgcagatgaacagcctgagagcagaggatacagctgtgtactactgtgccagagactatgaggccaccatcccctttgatttctggggccagggcaccctggttacagtgtccagtggtgggggtggctctgggggtggaggcagtgcccatcctggcagacctagagctgtgcccacacagtgtgatgtgcctccaaacagcagatttgactgtgcccctgacaaggccatcacacaagagcagtgtgaagccagaggctgctgttacatccctgccaagcaaggactgcaaggggctcagatgggacagccctggtgcttcttcccaccatcttaccccagctacaagctggaaaacctgagcagctctgagatgggctacactgctacactgaccagaaccacacctacattcttcccaaaggacatcctgacactgaggctggatgtgatgatggaaacagagaacaggctgcacttcaccatcaaggaccctgccaatagaagatatgaggtgcccctggaaacccctcatgtgcactctagagccccatctccactgtactctgtggaattttctgaggaaccctttggggtcatagtcagaaggcagctggatggcagagtgctgctgaacacaactgtggcccctctgttctttgctgatcagttcctgcagctgagcaccagcctgcctagccagtatatcacaggcctggcagagcacctgtctccactgatgctgagcacatcctggaccagaatcaccctgtggaacagagacctggctcccacacctggggccaacctgtatggctctcaccccttctatctggccctggaagatggtggttcagcccatggtgtctttctgctgaactccaatgccatggatgtggtgctgcagccctctcctgctctgtcttggagaagcactggtggcatcctggatgtgtacatctttctgggccctgagcctaagtctgtggtgcagcagtacctggatgttgtgggctaccccttcatgcctccttattggggcctgggcttccacctgtgcagatggggatacagcagcacagccatcaccagacaggttgtggaaaacatgaccagagcacacttcccactggatgtgcagtggaatgacctggactacatggacagcagaagggacttcaccttcaacaaggatggcttcagagacttccctgccatggtgcaagagctgcaccaaggtggtagaagatatatgatgattgtggacccagccatcagctcctctggaccagctggcagctacagaccctatgatgagggactgagaagaggggtgttcatcaccaatgagacaggccagcctctgattggcaaagtgtggccaggctccacagcctttccagatttcacaaaccccacagctctggcttggtgggaagatatggtggcagagttccatgatcaggtgccctttgatggcatgtggattgacatgaatgagcccagcaacttcatcaggggctctgaggatggatgccccaacaatgaactggaaaatcctccttatgtgcctggtgttgttggagggacactgcaggcagccacaatttgtgccagctctcaccagtttctgagcacccactacaacctgcacaatctgtatggcctgactgaggccattgccagccacagggctcttgtgaaggctagaggcaccagaccttttgtgatcagcaggtccacctttgctggccatggcagatatgctggccactggactggggatgtgtggtctagttgggagcagctggctagctctgtgcctgagatcctgcagttcaacctgctgggagtgccccttgttggagcagatgtgtgtggcttcctgggcaacacctcagaggaactgtgtgtcagatggactcagctgggagcattctaccctttcatgagaaaccacaacagcctgctgagcctgcctcaagagccttacagcttttctgagccagcacagcaggccatgagaaaggccctgactctgagatatgccctgctgcctcacctgtacaccctgttccatcaggctcatgtggctggggagactgtggctagacccctgttcctggaattccccaaggacagctccacctggacagtggatcatcagctgctgtggggagaagccctgctgattacacctgtgctgcaggctggcaaggctgaagtgacaggctacttccctcttggcacttggtatgacctgcagacagtgcctgtggaagctctgggatctctgcctccacctcctgctgctcctagagagcctgccattcactctgaaggccagtgggttaccctgcctgctccactggataccatcaatgtgcatctgagagcaggctacatcatccctctgcaaggccctggcctgaccaccacagaatctagacagcagccaatggcactggctgtggccctgaccaaaggtggagaagctagaggggagctgttctgggatgatggggagagcctggaagtgctggaaagaggggcctatacacaagtgatttttctggctaggaacaataccattgtgaatgagcttgtcagagtcacctctgaaggtgctggcctgcagctccagaaagtgacagtgcttggagtggccacagcaccccagcaagtgctgtctaatggggtgccagtgtccaacttcacatacagccctgataccaaggtcctggacatctgtgtgtccctgcttatgggagagcagttcctggtgtcttggtgc

SEQ ID NO: 701 - DNA, 3405 bp, synthetic construct
  misc_feature 1..3405: note = Synthetic
  source 1..3405: mol_type = other DNA
gatatccaaatgacccagagccccagctccctgtcagcctctgtgggagacagagtgaccatcacatgcagagccagccagagcatcagcagctacctgaactggtaccagcagaagcctggcaaggcccccaagctgctgatctatgctgccagcagcctgcagtctggagtgccttccagattctctggctcaggcagtggcacagacttcaccctgacaatcagcagcctgcagcctgaagactttgccacctactactgccagcagagctacagcacaccacctatcacctttggccagggcaccagactggagatcaaagggggtgggggctctggggggggaggcagtggaggaggtggctctgaagtccagctggtggagtctggaggaggcctggtgcagcctggaggcagcctgaggctgtcctgtgcagcctctggcttcaccttcaacatctttgagatgaactgggttaggcaggcccctggcaagggcctggaatggatcagctacattagcagcagaggcaccacaacctactatgctgactctgtgaggggcagattcaccatcagcagagataatgccaagaacagcctgtacctgcagatgaacagcctcagagctgaggacacagctgtgtactactgtgccagagattatgaggccaccatcccctttgacttctggggccaaggcaccctggtgacagtgtcttctggaggtggaggctctggaggaggtggcagtgcccatcctggcagacctagagctgtgcccacacagtgtgatgtgcctccaaacagcagatttgactgtgcccctgacaaggccatcacacaagagcagtgtgaagccagaggctgctgttacatccctgccaagcaaggactgcaaggggctcagatgggacagccctggtgcttcttcccaccatcttaccccagctacaagctggaaaacctgagcagctctgagatgggctacactgctacactgaccagaaccacacctacattcttcccaaaggacatcctgacactgaggctggatgtgatgatggaaacagagaacaggctgcacttcaccatcaaggaccctgccaatagaagatatgaggtgcccctggaaacccctcatgtgcactctagagccccatctccactgtactctgtggaattttctgaggaaccctttggggtcatagtcagaaggcagctggatggcagagtgctgctgaacacaactgtggcccctctgttctttgctgatcagttcctgcagctgagcaccagcctgcctagccagtatatcacaggcctggcagagcacctgtctccactgatgctgagcacatcctggaccagaatcaccctgtggaacagagacctggctcccacacctggggccaacctgtatggctctcaccccttctatctggccctggaagatggtggttcagcccatggtgtctttctgctgaactccaatgccatggatgtggtgctgcagccctctcctgctctgtcttggagaagcactggtggcatcctggatgtgtacatctttctgggccctgagcctaagtctgtggtgcagcagtacctggatgttgtgggctaccccttcatgcctccttattggggcctgggcttccacctgtgcagatggggatacagcagcacagccatcaccagacaggttgtggaaaacatgaccagagcacacttcccactggatgtgcagtggaatgacctggactacatggacagcagaagggacttcaccttcaacaaggatggcttcagagacttccctgccatggtgcaagagctgcaccaaggtggtagaagatatatgatgattgtggacccagccatcagctcctctggaccagctggcagctacagaccctatgatgagggactgagaagaggggtgttcatcaccaatgagacaggccagcctctgattggcaaagtgtggccaggctccacagcctttccagatttcacaaaccccacagctctggcttggtgggaagatatggtggcagagttccatgatcaggtgccctttgatggcatgtggattgacatgaatgagcccagcaacttcatcaggggctctgaggatggatgccccaacaatgaactggaaaatcctccttatgtgcctggtgttgttggagggacactgcaggcagccacaatttgtgccagctctcaccagtttctgagcacccactacaacctgcacaatctgtatggcctgactgaggccattgccagccacagggctcttgtgaaggctagaggcaccagaccttttgtgatcagcaggtccacctttgctggccatggcagatatgctggccactggactggggatgtgtggtctagttgggagcagctggctagctctgtgcctgagatcctgcagttcaacctgctgggagtgccccttgttggagcagatgtgtgtggcttcctgggcaacacctcagaggaactgtgtgtcagatggactcagctgggagcattctaccctttcatgagaaaccacaacagcctgctgagcctgcctcaagagccttacagcttttctgagccagcacagcaggccatgagaaaggccctgactctgagatatgccctgctgcctcacctgtacaccctgttccatcaggctcatgtggctggggagactgtggctagacccctgttcctggaattccccaaggacagctccacctggacagtggatcatcagctgctgtggggagaagccctgctgattacacctgtgctgcaggctggcaaggctgaagtgacaggctacttccctcttggcacttggtatgacctgcagacagtgcctgtggaagctctgggatctctgcctccacctcctgctgctcctagagagcctgccattcactctgaaggccagtgggttaccctgcctgctccactggataccatcaatgtgcatctgagagcaggctacatcatccctctgcaaggccctggcctgaccaccacagaatctagacagcagccaatggcactggctgtggccctgaccaaaggtggagaagctagaggggagctgttctgggatgatggggagagcctggaagtgctggaaagaggggcctatacacaagtgatttttctggctaggaacaataccattgtgaatgagcttgtcagagtcacctctgaaggtgctggcctgcagctccagaaagtgacagtgcttggagtggccacagcaccccagcaagtgctgtctaatggggtgccagtgtccaacttcacatacagccctgataccaaggtcctggacatctgtgtgtccctgcttatgggagagcagttcctggtgtcttggtgc

SEQ ID NO: 702 - DNA, 3411 bp, synthetic construct
  misc_feature 1..3411: note = Synthetic
  source 1..3411: mol_type = other DNA
gacatccagatgacacagagcccctctagcctgtctgcctctgtgggagacagagtgaccatcacctgtagagccagccagagcatcagcagctacctgaactggtatcagcagaagcctggcaaggcccctaaactgctgatctatgctgccagcagcctgcagtctggggtgccctctagattttctggcagtggctctggcacagacttcaccctgaccataagctccctgcagcctgaggactttgccacctactactgtcagcagagctacagcacccctcctatcacctttggccagggcaccagactggaaatcaaaggtggtggtggaagtggtggtggtggcagtggtggtggtggatctgaagtgcagctggtggaaagtggtggtggcctggttcagcctggcagatccctgagactgagctgtgcagcctctggctttacctttgatgactatgccatgaactgggtcagacaggccccaggcaaaggcctggaatgggtgtcaggcatctcttggtcctctggctccatggactatgctgactctgtgaagggcagattcaccatcagcagagacaatgccaagaacagcctgtacctgcagatgaactccctgagaacagaggacacagccctgtactactgtgccaaggccagagaagtgggagactactatggcatggatgtgtggggccagggaaccacagtgacagtcagtagtggtggtggtggcagtggtggtggtggttctgcccatcctggcagacctagagctgtgcccacacagtgtgatgtgcctccaaacagcagatttgactgtgcccctgacaaggccatcacacaagagcagtgtgaagccagaggctgctgttacatccctgccaagcaaggactgcaaggggctcagatgggacagccctggtgcttcttcccaccatcttaccccagctacaagctggaaaacctgagcagctctgagatgggctacactgctacactgaccagaaccacacctacattcttcccaaaggacatcctgacactgaggctggatgtgatgatggaaacagagaacaggctgcacttcaccatcaaggaccctgccaatagaagatatgaggtgcccctggaaacccctcatgtgcactctagagccccatctccactgtactctgtggaattttctgaggaaccctttggggtcatagtcagaaggcagctggatggcagagtgctgctgaacacaactgtggcccctctgttctttgctgatcagttcctgcagctgagcaccagcctgcctagccagtatatcacaggcctggcagagcacctgtctccactgatgctgagcacatcctggaccagaatcaccctgtggaacagagacctggctcccacacctggggccaacctgtatggctctcaccccttctatctggccctggaagatggtggttcagcccatggtgtctttctgctgaactccaatgccatggatgtggtgctgcagccctctcctgctctgtcttggagaagcactggtggcatcctggatgtgtacatctttctgggccctgagcctaagtctgtggtgcagcagtacctggatgttgtgggctaccccttcatgcctccttattggggcctgggcttccacctgtgcagatggggatacagcagcacagccatcaccagacaggttgtggaaaacatgaccagagcacacttcccactggatgtgcagtggaatgacctggactacatggacagcagaagggacttcaccttcaacaaggatggcttcagagacttccctgccatggtgcaagagctgcaccaaggtggtagaagatatatgatgattgtggacccagccatcagctcctctggaccagctggcagctacagaccctatgatgagggactgagaagaggggtgttcatcaccaatgagacaggccagcctctgattggcaaagtgtggccaggctccacagcctttccagatttcacaaaccccacagctctggcttggtgggaagatatggtggcagagttccatgatcaggtgccctttgatggcatgtggattgacatgaatgagcccagcaacttcatcaggggctctgaggatggatgccccaacaatgaactggaaaatcctccttatgtgcctggtgttgttggagggacactgcaggcagccacaatttgtgccagctctcaccagtttctgagcacccactacaacctgcacaatctgtatggcctgactgaggccattgccagccacagggctcttgtgaaggctagaggcaccagaccttttgtgatcagcaggtccacctttgctggccatggcagatatgctggccactggactggggatgtgtggtctagttgggagcagctggctagctctgtgcctgagatcctgcagttcaacctgctgggagtgccccttgttggagcagatgtgtgtggcttcctgggcaacacctcagaggaactgtgtgtcagatggactcagctgggagcattctaccctttcatgagaaaccacaacagcctgctgagcctgcctcaagagccttacagcttttctgagccagcacagcaggccatgagaaaggccctgactctgagatatgccctgctgcctcacctgtacaccctgttccatcaggctcatgtggctggggagactgtggctagacccctgttcctggaattccccaaggacagctccacctggacagtggatcatcagctgctgtggggagaagccctgctgattacacctgtgctgcaggctggcaaggctgaagtgacaggctacttccctcttggcacttggtatgacctgcagacagtgcctgtggaagctctgggatctctgcctccacctcctgctgctcctagagagcctgccattcactctgaaggccagtgggttaccctgcctgctccactggataccatcaatgtgcatctgagagcaggctacatcatccctctgcaaggccctggcctgaccaccacagaatctagacagcagccaatggcactggctgtggccctgaccaaaggtggagaagctagaggggagctgttctgggatgatggggagagcctggaagtgctggaaagaggggcctatacacaagtgatttttctggctaggaacaataccattgtgaatgagcttgtcagagtcacctctgaaggtgctggcctgcagctccagaaagtgacagtgcttggagtggccacagcaccccagcaagtgctgtctaatggggtgccagtgtccaacttcacatacagccctgataccaaggtcctggacatctgtgtgtccctgcttatgggagagcagttcctggtgtcttggtgc

SEQ ID NO: 703 - DNA, 3411 bp, synthetic construct
  misc_feature 1..3411: note = Synthetic
  source 1..3411: mol_type = other DNA
gatatccagatgacccagagccccagcagcctgtctgccagtgtgggggatagagtgaccatcacctgcagggccagccagagcatcagcagctacctcaactggtaccagcaaaagcctggcaaggcccccaaactgctgatttatgctgccagcagcctgcagtctggggtcccttccagattctctggctctggctctggcacagacttcaccctgaccatcagcagcctgcagccagaggactttgccacatactactgccagcagagctacagcaccccccctatcacctttggccagggcaccaggctggagatcaagggaggtgggggctcaggaggaggtggctctggaggaggaggctcagaggtgcagctggttgagagtggaggaggcctggtgcagcctggcagaagcctgagactgagctgtgctgcctctggcttcacctttgatgactatgccatgaactgggtgagacaggcccctggcaagggcctggaatgggtgtctggcatctcctggagctctggcagcatggactatgctgactctgtgaagggcaggttcaccatcagcagagacaatgccaagaacagcctgtacctgcagatgaacagcctgagaacagaagacacagccctgtactactgtgcaaaagccagagaagtgggagactactatggcatggatgtgtggggccaaggcaccacagtgacagtgagcagtggtggaggtggctcagggggaggaggcagtgcccatcctggcagacctagagctgtgcccacacagtgtgatgtgcctccaaacagcagatttgactgtgcccctgacaaggccatcacacaagagcagtgtgaagccagaggctgctgttacatccctgccaagcaaggactgcaaggggctcagatgggacagccctggtgcttcttcccaccatcttaccccagctacaagctggaaaacctgagcagctctgagatgggctacactgctacactgaccagaaccacacctacattcttcccaaaggacatcctgacactgaggctggatgtgatgatggaaacagagaacaggctgcacttcaccatcaaggaccctgccaatagaagatatgaggtgcccctggaaacccctcatgtgcactctagagccccatctccactgtactctgtggaattttctgaggaaccctttggggtcatagtcagaaggcagctggatggcagagtgctgctgaacacaactgtggcccctctgttctttgctgatcagttcctgcagctgagcaccagcctgcctagccagtatatcacaggcctggcagagcacctgtctccactgatgctgagcacatcctggaccagaatcaccctgtggaacagagacctggctcccacacctggggccaacctgtatggctctcaccccttctatctggccctggaagatggtggttcagcccatggtgtctttctgctgaactccaatgccatggatgtggtgctgcagccctctcctgctctgtcttggagaagcactggtggcatcctggatgtgtacatctttctgggccctgagcctaagtctgtggtgcagcagtacctggatgttgtgggctaccccttcatgcctccttattggggcctgggcttccacctgtgcagatggggatacagcagcacagccatcaccagacaggttgtggaaaacatgaccagagcacacttcccactggatgtgcagtggaatgacctggactacatggacagcagaagggacttcaccttcaacaaggatggcttcagagacttccctgccatggtgcaagagctgcaccaaggtggtagaagatatatgatgattgtggacccagccatcagctcctctggaccagctggcagctacagaccctatgatgagggactgagaagaggggtgttcatcaccaatgagacaggccagcctctgattggcaaagtgtggccaggctccacagcctttccagatttcacaaaccccacagctctggcttggtgggaagatatggtggcagagttccatgatcaggtgccctttgatggcatgtggattgacatgaatgagcccagcaacttcatcaggggctctgaggatggatgccccaacaatgaactggaaaatcctccttatgtgcctggtgttgttggagggacactgcaggcagccacaatttgtgccagctctcaccagtttctgagcacccactacaacctgcacaatctgtatggcctgactgaggccattgccagccacagggctcttgtgaaggctagaggcaccagaccttttgtgatcagcaggtccacctttgctggccatggcagatatgctggccactggactggggatgtgtggtctagttgggagcagctggctagctctgtgcctgagatcctgcagttcaacctgctgggagtgccccttgttggagcagatgtgtgtggcttcctgggcaacacctcagaggaactgtgtgtcagatggactcagctgggagcattctaccctttcatgagaaaccacaacagcctgctgagcctgcctcaagagccttacagcttttctgagccagcacagcaggccatgagaaaggccctgactctgagatatgccctgctgcctcacctgtacaccctgttccatcaggctcatgtggctggggagactgtggctagacccctgttcctggaattccccaaggacagctccacctggacagtggatcatcagctgctgtggggagaagccctgctgattacacctgtgctgcaggctggcaaggctgaagtgacaggctacttccctcttggcacttggtatgacctgcagacagtgcctgtggaagctctgggatctctgcctccacctcctgctgctcctagagagcctgccattcactctgaaggccagtgggttaccctgcctgctccactggataccatcaatgtgcatctgagagcaggctacatcatccctctgcaaggccctggcctgaccaccacagaatctagacagcagccaatggcactggctgtggccctgaccaaaggtggagaagctagaggggagctgttctgggatgatggggagagcctggaagtgctggaaagaggggcctatacacaagtgatttttctggctaggaacaataccattgtgaatgagcttgtcagagtcacctctgaaggtgctggcctgcagctccagaaagtgacagtgcttggagtggccacagcaccccagcaagtgctgtctaatggggtgccagtgtccaacttcacatacagccctgataccaaggtcctggacatctgtgtgtccctgcttatgggagagcagttcctggtgtcttggtgc

SEQ ID NO: 704 - DNA, 3411 bp, synthetic construct
  misc_feature 1..3411: note = Synthetic
  source 1..3411: mol_type = other DNA
gacatccagatgacccagagccccagctccctgtcagccagtgtgggtgacagagtgaccatcacctgcagagccagccagagcatcagcagctacctgaactggtaccagcagaaacctggcaaagcccccaagctgctgatttatgctgctagcagcctgcagagtggagtgcccagcagattctcaggcagtggctctggcacagacttcaccctgaccatctccagcctgcagccagaagactttgccacctactactgccagcagagctacagcacccctcctatcacctttggccagggcacaagactggagatcaagggaggaggaggctctggaggaggaggctctggagggggaggctctgaggtccaactggttgaatctggagggggcctggtgcaacctggcaggagcctgagactgagctgtgctgcctctggcttcacctttgatgactatgccatgaactgggtgagacaggcccctggcaagggcctggagtgggtgtctggcatcagctggagctctggcagcatggactatgcagattctgtgaagggcaggttcaccatcagcagagataatgccaagaacagcctgtacctgcagatgaacagcctcaggacagaggacacagccctgtactactgtgccaaggccagagaagtgggtgactactatggcatggatgtgtggggccagggcaccacagtgacagtgagctctgggggaggaggctcaggtgggggtggcagtgcccatcctggcagacctagagctgtgcccacacagtgtgatgtgcctccaaacagcagatttgactgtgcccctgacaaggccatcacacaagagcagtgtgaagccagaggctgctgttacatccctgccaagcaaggactgcaaggggctcagatgggacagccctggtgcttcttcccaccatcttaccccagctacaagctggaaaacctgagcagctctgagatgggctacactgctacactgaccagaaccacacctacattcttcccaaaggacatcctgacactgaggctggatgtgatgatggaaacagagaacaggctgcacttcaccatcaaggaccctgccaatagaagatatgaggtgcccctggaaacccctcatgtgcactctagagccccatctccactgtactctgtggaattttctgaggaaccctttggggtcatagtcagaaggcagctggatggcagagtgctgctgaacacaactgtggcccctctgttctttgctgatcagttcctgcagctgagcaccagcctgcctagccagtatatcacaggcctggcagagcacctgtctccactgatgctgagcacatcctggaccagaatcaccctgtggaacagagacctggctcccacacctggggccaacctgtatggctctcaccccttctatctggccctggaagatggtggttcagcccatggtgtctttctgctgaactccaatgccatggatgtggtgctgcagccctctcctgctctgtcttggagaagcactggtggcatcctggatgtgtacatctttctgggccctgagcctaagtctgtggtgcagcagtacctggatgttgtgggctaccccttcatgcctccttattggggcctgggcttccacctgtgcagatggggatacagcagcacagccatcaccagacaggttgtggaaaacatgaccagagcacacttcccactggatgtgcagtggaatgacctggactacatggacagcagaagggacttcaccttcaacaaggatggcttcagagacttccctgccatggtgcaagagctgcaccaaggtggtagaagatatatgatgattgtggacccagccatcagctcctctggaccagctggcagctacagaccctatgatgagggactgagaagaggggtgttcatcaccaatgagacaggccagcctctgattggcaaagtgtggccaggctccacagcctttccagatttcacaaaccccacagctctggcttggtgggaagatatggtggcagagttccatgatcaggtgccctttgatggcatgtggattgacatgaatgagcccagcaacttcatcaggggctctgaggatggatgccccaacaatgaactggaaaatcctccttatgtgcctggtgttgttggagggacactgcaggcagccacaatttgtgccagctctcaccagtttctgagcacccactacaacctgcacaatctgtatggcctgactgaggccattgccagccacagggctcttgtgaaggctagaggcaccagaccttttgtgatcagcaggtccacctttgctggccatggcagatatgctggccactggactggggatgtgtggtctagttgggagcagctggctagctctgtgcctgagatcctgcagttcaacctgctgggagtgccccttgttggagcagatgtgtgtggcttcctgggcaacacctcagaggaactgtgtgtcagatggactcagctgggagcattctaccctttcatgagaaaccacaacagcctgctgagcctgcctcaagagccttacagcttttctgagccagcacagcaggccatgagaaaggccctgactctgagatatgccctgctgcctcacctgtacaccctgttccatcaggctcatgtggctggggagactgtggctagacccctgttcctggaattccccaaggacagctccacctggacagtggatcatcagctgctgtggggagaagccctgctgattacacctgtgctgcaggctggcaaggctgaagtgacaggctacttccctcttggcacttggtatgacctgcagacagtgcctgtggaagctctgggatctctgcctccacctcctgctgctcctagagagcctgccattcactctgaaggccagtgggttaccctgcctgctccactggataccatcaatgtgcatctgagagcaggctacatcatccctctgcaaggccctggcctgaccaccacagaatctagacagcagccaatggcactggctgtggccctgaccaaaggtggagaagctagaggggagctgttctgggatgatggggagagcctggaagtgctggaaagaggggcctatacacaagtgatttttctggctaggaacaataccattgtgaatgagcttgtcagagtcacctctgaaggtgctggcctgcagctccagaaagtgacagtgcttggagtggccacagcaccccagcaagtgctgtctaatggggtgccagtgtccaacttcacatacagccctgataccaaggtcctggacatctgtgtgtccctgcttatgggagagcagttcctggtgtcttggtgc

SEQ ID NO: 705 - DNA, 738 bp, synthetic construct
  misc_feature 1..738: note = Synthetic
  source 1..738: mol_type = other DNA
gacatccagatgacacagagcccatcctctgtgtctgcctctgtgggagacagagtgaccatcacctgtagagccagccagggcattgcttcttggctggcctggtatcagcagaagcctggaaaggcccctgagctgctgatctatgctgccagctctctgcaaggtggtgtccccagcagattcagtggcagtggctctggcacagacttcaccctgaccataagcagcctgcagcctgaggactttgccatctactactgccagcaggccaactacttcccctggacatttggccagggcaccaaggtggaaatcaaaggtggtggtggaagtggtggtggtggcagtggtggtggtggaagccagatcaccctgaaagagtctggccccacactggtcaagcccacacagaccctgacactgacctgcaccttctctggcttcagcctgagcaccagtggtgttggagttgtgtggatcagacagcctcctggcaaggccctggaatggctggcactgatctactggaatgaccacaagagatacagccccagcctgggcagcagactgacaatcaccaaggacaccagcaagaaccaggtggtgctgaccatgaccaacatggaccctgtggacacagccacctactattgtgcccactactctggcagctacagctactactactatggcctggatgtgtggggacagggcacaacagtgacagtgtccagt

SEQ ID NO: 706 - DNA, 738 bp, synthetic construct
  misc_feature 1..738: note = Synthetic
  source 1..738: mol_type = other DNA
gacatccagatgacccagagcccaagctctgtgtctgcctcagtgggagacagagtgacaatcacctgcagagccagccagggcattgccagctggctggcctggtaccagcagaagcctggcaaagctcctgaactcctgatctatgctgccagcagcctgcagggtggggtgcctagcaggttctctggctcaggctctggcacagacttcaccctgacaatcagcagcctgcagcctgaggactttgctatctactactgccagcaggccaactacttcccctggacctttggccaaggcaccaaggtggagatcaagggaggaggaggctctggtggaggtggctctgggggagggggcagccagatcaccctgaaggagagtggccctacactggttaagcccacccagacactgacactgacctgcaccttctctggcttcagcctgagcaccagtggagtgggagtggtgtggatcagacagccccctggcaaggccctggaatggctggccctgatctactggaatgatcacaagagatacagccctagcctgggctccagactgaccatcaccaaggacaccagcaaaaaccaggtggtgctgaccatgaccaacatggatccagtggacacagccacctactactgtgcccactactctggcagctacagctactactactatggcctggatgtctggggccaaggcaccacagtcacagtgtccagt

SEQ ID NO: 707 - DNA, 738 bp, synthetic construct
  misc_feature 1..738: note = Synthetic
  source 1..738: mol_type = other DNA
gatatccagatgacacaaagcccttcctctgtgtctgcttcagtgggagacagagtcacaatcacatgcagagccagccagggcattgccagctggctggcctggtaccagcagaagcctggcaaagccccagaactgctgatctatgctgccagcagcctccagggtggggtgcccagcagattctctggctctggctctggcacagacttcaccctgaccatcagcagcctgcagccagaggactttgccatctactactgccagcaggccaactacttcccctggacctttggccagggcaccaaggtggaaatcaaggggggaggaggctctggaggaggaggcagtggtggaggaggcagccagatcaccctgaaggagtctggccctaccctggtgaagcctacccagaccctgaccctgacctgcaccttctctggcttcagcctgagcacaagtggtgtgggagtggtgtggatcagacaaccccctggcaaggctctggagtggctggccctgatctactggaatgaccacaagagatacagccctagcctgggcagcaggctgaccatcaccaaagataccagcaagaaccaggtggtgctgaccatgaccaacatggaccctgttgacacagccacatactactgtgcccactacagtggcagctacagctactactactatggcctggatgtctggggccagggcaccacagtgacagtgtcctca

SEQ ID NO: 708 - DNA, 726 bp, synthetic construct
  misc_feature 1..726: note = Synthetic
  source 1..726: mol_type = other DNA
gacatccagatgacacagagcccctctagcctgtctgcctctgtgggagacagagtgaccatcacctgtagagccagccagagcatcagcagctacctgaactggtatcagcagaagcctggcaaggcccctaaactgctgatctatgctgccagcagcctgcagtctggggtgccctctagattttctggcagtggctctggcacagacttcaccctgaccataagctccctgcagcctgaggactttgccacctactactgtcagcagagctacagcacccctcctatcacctttggccagggcaccagactggaaatcaaaggtggtggtggaagtggtggtggtggcagtggtggtggtggatctgaagtgcagctggtggaaagtggtggtggcctggttcagcctggtggctctctgagactgagctgtgcagcctctggcttcaccttcaacatctttgagatgaactgggtcagacaggccccaggcaaaggcctggaatggatcagctacatcagctccagaggcaccacaacctactatgctgactctgtcagaggcaggttcaccatcagcagagacaatgccaagaacagcctgtacctgcagatgaactccctgagagctgaggacacagcagtgtactactgtgccagggactatgaggctacaatcccctttgacttctggggccagggaaccctggtcacagttagcagt

SEQ ID NO: 709 - DNA, 726 bp, synthetic construct
  misc_feature 1..726: note = Synthetic
  source 1..726: mol_type = other DNA
gacatccagatgacccagagccccagcagcctgtctgcctctgtgggtgacagggtgaccattacctgcagagccagccaaagcatcagcagctacctgaactggtaccagcagaagccaggcaaggcccctaagctgctgatctatgctgccagcagcctgcaatctggagtgcctagcagattcagtggctctggctcaggcacagacttcaccctgaccatctccagcctccagcctgaggattttgccacctactactgccagcagagctacagcaccccccctatcacctttggccagggcaccagactggaaatcaagggaggaggaggctctggaggaggaggctctggagggggaggctctgaggtgcagctggtggagtctgggggaggcctggtgcagcctggaggctccctgaggctgagctgtgctgcctcaggcttcaccttcaacatctttgaaatgaactgggtcagacaggcccctggcaaaggcctggaatggatcagctacatcagcagcagaggcacaacaacatactatgctgactctgtgagaggcaggttcacaatcagcagagacaatgccaagaacagcctgtacctgcagatgaacagcctgagagcagaggatacagctgtgtactactgtgccagagactatgaggccaccatcccctttgatttctggggccagggcaccctggttacagtgtccagt

SEQ ID NO: 710 - DNA, 726 bp, synthetic construct
  misc_feature 1..726: note = Synthetic
  source 1..726: mol_type = other DNA
gatatccaaatgacccagagccccagctccctgtcagcctctgtgggagacagagtgaccatcacatgcagagccagccagagcatcagcagctacctgaactggtaccagcagaagcctggcaaggcccccaagctgctgatctatgctgccagcagcctgcagtctggagtgccttccagattctctggctcaggcagtggcacagacttcaccctgacaatcagcagcctgcagcctgaagactttgccacctactactgccagcagagctacagcacaccacctatcacctttggccagggcaccagactggagatcaaagggggtgggggctctggggggggaggcagtggaggaggtggctctgaagtccagctggtggagtctggaggaggcctggtgcagcctggaggcagcctgaggctgtcctgtgcagcctctggcttcaccttcaacatctttgagatgaactgggttaggcaggcccctggcaagggcctggaatggatcagctacattagcagcagaggcaccacaacctactatgctgactctgtgaggggcagattcaccatcagcagagataatgccaagaacagcctgtacctgcagatgaacagcctcagagctgaggacacagctgtgtactactgtgccagagattatgaggccaccatcccctttgacttctggggccaaggcaccctggtgacagtgtcttct

SEQ ID NO: 711 - DNA, 732 bp, synthetic construct
  misc_feature 1..732: note = Synthetic
  source 1..732: mol_type = other DNA
gacatccagatgacacagagcccctctagcctgtctgcctctgtgggagacagagtgaccatcacctgtagagccagccagagcatcagcagctacctgaactggtatcagcagaagcctggcaaggcccctaaactgctgatctatgctgccagcagcctgcagtctggggtgccctctagattttctggcagtggctctggcacagacttcaccctgaccataagctccctgcagcctgaggactttgccacctactactgtcagcagagctacagcacccctcctatcacctttggccagggcaccagactggaaatcaaaggtggtggtggaagtggtggtggtggcagtggtggtggtggatctgaagtgcagctggtggaaagtggtggtggcctggttcagcctggcagatccctgagactgagctgtgcagcctctggctttacctttgatgactatgccatgaactgggtcagacaggccccaggcaaaggcctggaatgggtgtcaggcatctcttggtcctctggctccatggactatgctgactctgtgaagggcagattcaccatcagcagagacaatgccaagaacagcctgtacctgcagatgaactccctgagaacagaggacacagccctgtactactgtgccaaggccagagaagtgggagactactatggcatggatgtgtggggccagggaaccacagtgacagtcagtagt

SEQ ID NO: 712 - DNA, 732 bp, synthetic construct
  misc_feature 1..732: note = Synthetic
  source 1..732: mol_type = other DNA
gatatccagatgacccagagccccagcagcctgtctgccagtgtgggggatagagtgaccatcacctgcagggccagccagagcatcagcagctacctcaactggtaccagcaaaagcctggcaaggcccccaaactgctgatttatgctgccagcagcctgcagtctggggtcccttccagattctctggctctggctctggcacagacttcaccctgaccatcagcagcctgcagccagaggactttgccacatactactgccagcagagctacagcaccccccctatcacctttggccagggcaccaggctggagatcaagggaggtgggggctcaggaggaggtggctctggaggaggaggctcagaggtgcagctggttgagagtggaggaggcctggtgcagcctggcagaagcctgagactgagctgtgctgcctctggcttcacctttgatgactatgccatgaactgggtgagacaggcccctggcaagggcctggaatgggtgtctggcatctcctggagctctggcagcatggactatgctgactctgtgaagggcaggttcaccatcagcagagacaatgccaagaacagcctgtacctgcagatgaacagcctgagaacagaagacacagccctgtactactgtgcaaaagccagagaagtgggagactactatggcatggatgtgtggggccaaggcaccacagtgacagtgagcagt

SEQ ID NO: 713 - DNA, 732 bp, synthetic construct
  misc_feature 1..732: note = Synthetic
  source 1..732: mol_type = other DNA
gacatccagatgacccagagccccagctccctgtcagccagtgtgggtgacagagtgaccatcacctgcagagccagccagagcatcagcagctacctgaactggtaccagcagaaacctggcaaagcccccaagctgctgatttatgctgctagcagcctgcagagtggagtgcccagcagattctcaggcagtggctctggcacagacttcaccctgaccatctccagcctgcagccagaagactttgccacctactactgccagcagagctacagcacccctcctatcacctttggccagggcacaagactggagatcaagggaggaggaggctctggaggaggaggctctggagggggaggctctgaggtccaactggttgaatctggagggggcctggtgcaacctggcaggagcctgagactgagctgtgctgcctctggcttcacctttgatgactatgccatgaactgggtgagacaggcccctggcaagggcctggagtgggtgtctggcatcagctggagctctggcagcatggactatgcagattctgtgaagggcaggttcaccatcagcagagataatgccaagaacagcctgtacctgcagatgaacagcctcaggacagaggacacagccctgtactactgtgccaaggccagagaagtgggtgactactatggcatggatgtgtggggccagggcaccacagtgacagtgagctct

SEQ ID NO: 714 - DNA, 738 bp, synthetic construct
  misc_feature 1..738: note = Synthetic
  source 1..738: mol_type = other DNA
gacatccagatgacccagtctccatcttccgtgtctgcatctgtaggagacagagtcaccatcacttgtcgggcgagtcagggtattgccagctggttagcctggtatcagcagaaaccagggaaagcccctgagctcctgatctatgctgcatccagtttgcaaggtggggtcccatcaaggttcagcggcagtggatctgggacagatttcactctcaccatcagcagcctgcagcctgaagattttgcaatttactattgtcaacaggctaactatttcccgtggacgttcggccaagggaccaaggtggaaatcaaaggcggcggcggaagcggagggggaggatcaggaggaggcggatcccagatcaccttgaaggagtctggtcctacgctggtgaaacccacacagaccctcacgctgacctgcaccttctctgggttctcactcagcactagtggagtgggtgtggtctggatccgtcagccccccggaaaggccctggagtggcttgcactcatttattggaatgatcataagcggtacagcccatctctggggagcaggctcaccatcaccaaggacacctccaaaaaccaggtggtccttacaatgaccaacatggaccctgtggacacagccacatattactgtgcacactacagtgggagctattcctactactactatggtttggacgtctggggccaagggaccacggtcaccgtctcctca

SEQ ID NO: 715 - DNA, 747 bp, synthetic construct
  misc_feature 1..747: note = Synthetic
  source 1..747: mol_type = other DNA
gacatccagatgacccagtctccatcctccctgtctgcatctgtaggagacagagtcaccatcacttgccgggcaagtcagagcattagcagctatttaaattggtatcagcagaaaccagggaaagcccctaagctcctgatctatgctgcatccagtttgcaaagtggggtcccgtcaaggttcagtggcagtggatctgggacagatttcactctcaccatcagcagtctgcaacctgaagattttgcaacttactactgtcaacagagttacagtacccctccgatcaccttcggccaagggacacgactggagattaaaggcggcggcggaagcggagggggaggatcaggaggaggcggatcccaggtgcagctggtggagtctgggggaggcgtggtccagcctggaaggtccctgagactctcctgcgcagcctctggattcccctttagtaattatgtcatgtattgggtccgccaggctccaggcaaggggctggagtgggtggctcttattttttttgacggaaagaaaaactatcatgcagactccgtgaagggccgattcaccataaccagagacaattccaaaaatatgttatatctgcaaatgaacagcctgagacctgaggacgcggctgtgtattactgtgcgaaaatccattgtcctaatggtgtatgttacaaggggtattacggaatggacgtctggggccaagggaccacggtcaccgtctcctca

SEQ ID NO: 716 - DNA, 726 bp, synthetic construct
  misc_feature 1..726: note = Synthetic
  source 1..726: mol_type = other DNA
gacatccagatgacccagtctccatcctccctgtctgcatctgtaggagacagagtcaccatcacttgccgggcaagtcagagcattagcagctatttaaattggtatcagcagaaaccagggaaagcccctaagctcctgatctatgctgcatccagtttgcaaagtggggtcccgtcaaggttcagtggcagtggatctgggacagatttcactctcaccatcagcagtctgcaacctgaagattttgcaacttactactgtcaacagagttacagtacccctccgatcaccttcggccaagggacacgactggagattaaaggcggcggcggaagcggagggggaggatcaggaggaggcggatccgaggtgcagctggtggagtctgggggaggcttagtacagcctggagggtccctaagactctcctgtgcagcctctggattcaccttcaatatttttgaaatgaactgggtccgccaggctccagggaaggggctggagtggatttcctacattagtagtcgtggaactaccacatactacgcagactctgtgaggggccgattcaccatctccagagacaacgccaagaactcactgtatctgcaaatgaacagcctgagagccgaggacacggctgtttattactgtgcgagagattatgaagcaacaatcccttttgacttctggggccagggaaccctggtcaccgtctcctca

SEQ ID NO: 717 - DNA, 732 bp, synthetic construct
  misc_feature 1..732: note = Synthetic
  source 1..732: mol_type = other DNA
gacatccagatgacccagtctccatcctccctgtctgcatctgtaggagacagagtcaccatcacttgccgggcaagtcagagcattagcagctatttaaattggtatcagcagaaaccagggaaagcccctaagctcctgatctatgctgcatccagtttgcaaagtggggtcccgtcaaggttcagtggcagtggatctgggacagatttcactctcaccatcagcagtctgcaacctgaagattttgcaacttactactgtcaacagagttacagtacccctccgatcaccttcggccaagggacacgactggagattaaaggcggcggcggaagcggagggggaggatcaggaggaggcggatccgaagtgcagctggtggagtctgggggaggcttggttcagcctggcaggtccctgagactctcctgtgcagcctctggattcacctttgatgattatgccatgaactgggtccggcaagctccagggaagggcctggagtgggtctcaggtattagttggagtagtggtagcatggactatgcggactctgtgaagggccgattcaccatctccagagacaacgccaaaaactccctgtatctgcaaatgaacagtctgagaactgaggacacggccttatattactgtgcaaaagctagggaagttggagactactacggtatggacgtctggggccaagggaccacggtcaccgtctcctca

SEQ ID NO: 718 - protein, 5 aa, synthetic construct
  REGION 1..5: note = Synthetic
GGGGS

SEQ ID NO: 719 - protein, 107 aa, synthetic construct [sequence omitted]

SEQ ID NO: 720 - protein, 107 aa, synthetic construct
  REGION 1..107: note = Synthetic
ASTKGPSVFPLAPSSKSTSGGTAALGCLVKDYFPEPVTVSWNSGALTSGVHTFPAVLQSSGLYSLSSVVTVPSSSLGTQTYICNVNHKPSNTKVDKKVEPKSCDKTH

SEQ ID NO: 721 - protein, 214 aa, synthetic construct
  REGION 1..214: note = Synthetic
DIQMTQSPSSLSASVGDRVTITCRASQGISNYLAWYQQKPGKVPNLLIYAASTLQSGVPSRFSGSGSGTDFTLTISSLQPEDVATYYCQKYNSAPLTFGGGTKVEIKRTVAAPSVFIFPPSDEQLKSGTASVVCLLNNFYPREAKVQWKVDNALQSGNSQESVTEQDSKDSTYSLSSTLTLSKADYEKHKVYACEVTHQGLSSPVTKSFNRGEC

SEQ ID NO: 722 - protein, 228 aa, synthetic construct
  REGION 1..228: note = Synthetic
EVQLVESGGGLVQPGGSLRLSCAASGFAFSSYAMTWVRQAPGKGLEWVSVISGTGGSTYYADSVKGRFTISRDNSKNTLYLQMNSLRAEDTAVYYCAKGGAARRMEYFQYWGQGTLVTVSSASTKGPSVFPLAPSSKSTSGGTAALGCLVKDYFPEPVTVSWNSGALTSGVHTFPAVLQSSGLYSLSSVVTVPSSSLGTQTYICNVNHKPSNTKVDKKVEPKSCDKTH

SEQ ID NO: 723 - protein, 214 aa, synthetic construct
  REGION 1..214: note = Synthetic
DIQMTQSPSSLSASIGDRVTITCRASQGISNYLAWYQQKPGKVPKLLIYAASTLQSGVPSRFSGSGSGTDFTLTISSLQPEDVATYYCQNHNSVPLTFGGGTKVEIKRTVAAPSVFIFPPSDEQLKSGTASVVCLLNNFYPREAKVQWKVDNALQSGNSQESVTEQDSKDSTYSLSSTLTLSKADYEKHKVYACEVTHQGLSSPVTKSFNRGEC

SEQ ID NO: 724 - protein, 228 aa, synthetic construct
  REGION 1..228: note = Synthetic
EVQLVESGGGLVQPGGSLRLSCAASGFTFNSYAMTWVRQAPGKGLEWVSFIGGSTGNTYYAGSVKGRFTISSDNSKKTLYLQMNSLRAEDTAVYYCAKGGAARRMEYFQHWGQGTLVTVSSASTKGPSVFPLAPSSKSTSGGTAALGCLVKDYFPEPVTVSWNSGALTSGVHTFPAVLQSSGLYSLSSVVTVPSSSLGTQTYICNVNHKPSNTKVDKKVEPKSCDKTH

SEQ ID NO: 725 - protein, 214 aa, synthetic construct
  REGION 1..214: note = Synthetic
DIQMTQSPSSLSASVGDRVTITCRASQSIRNVLGWFQQKPGKAPQRLIYAASSLQSGVPSRFSGSGSGTEFTLTISSLQPEDFATYYCLQHNFYPLTFGGGTKVEIKRTVAAPSVFIFPPSDEQLKSGTASVVCLLNNFYPREAKVQWKVDNALQSGNSQESVTEQDSKDSTYSLSSTLTLSKADYEKHKVYACEVTHQGLSSPVTKSFNRGEC

SEQ ID NO: 726 - protein, 229 aa, synthetic construct
  REGION 1..229: note = Synthetic
QVQLVESGGGVVQPGRSLRLSCAASGFTFTTYGMHWVRQAPGKGLEWVAVIWYDGSNKYYGDSVKGRFTISRDNSKNTLYLQMNSLRVDDTAVYYCTRTHGYTRSSDGFDYWGQGTLVTVSSASTKGPSVFPLAPSSKSTSGGTAALGCLVKDYFPEPVTVSWNSGALTSGVHTFPAVLQSSGLYSLSSVVTVPSSSLGTQTYICNVNHKPSNTKVDKKVEPKSCDKTH

SEQ ID NO: 727 - protein, 214 aa, synthetic construct
  REGION 1..214: note = Synthetic
EIVLTQSPATLSLSPGERATLSCRASQSVSSYLAWYQQKPGQAPRLLIHDVSNRATGIPARFSGSGSGTDFTLTISSLEPEDFVVYYCQQRSDWPITFGQGTRLEIKRTVAAPSVFIFPPSDEQLKSGTASVVCLLNNFYPREAKVQWKVDNALQSGNSQESVTEQDSKDSTYSLSSTLTLSKADYEKHKVYACEVTHQGLSSPVTKSFNRGEC

SEQ ID NO: 728 - protein, 230 aa, synthetic construct
  REGION 1..230: note = Synthetic
EVQLVESGGGLVQPGRSLRLSCAASGFTFDDKAMHWVRQVPGKGLEWISGISWNSGTIGYADSVKGRFIISRDNAKNSLYLQMNSLRAEDTALYYCAKDGDTSGWYWYGLDVWGQGTTVTVSSASTKGPSVFPLAPSSKSTSGGTAALGCLVKDYFPEPVTVSWNSGALTSGVHTFPAVLQSSGLYSLSSVVTVPSSSLGTQTYICNVNHKPSNTKVDKKVEPKSCDKTH

SEQ ID NO: 729 - protein, 214 aa, synthetic construct
  REGION 1..214: note = Synthetic
DIQLTQSPSSLSASVGDRVTITCWASQGISSYLAWYQQKPGKAPKLLIYAASTLQSGVPSRFSGSGSGTEFTLTISSLQPEDFATYYCQQLNSYPLTFGGGTKVEIKRTVAAPSVFIFPPSDEQLKSGTASVVCLLNNFYPREAKVQWKVDNALQSGNSQESVTEQDSKDSTYSLSSTLTLSKADYEKHKVYACEVTHQGLSSPVTKSFNRGEC

SEQ ID NO: 730 - protein, 227 aa, synthetic construct
  REGION 1..227: note = Synthetic
QVQLVESGGGVVQPGRSLRLSCIASGFTFSVYGIHWVRQAPGKGLEWMAVISHDGNIKHYADSVKGRFTISRDNSKNTLYLQINSLRTEDTAVYYCAKDTWNSLDTFDIWGQGTMVTVSSASTKGPSVFPLAPSSKSTSGGTAALGCLVKDYFPEPVTVSWNSGALTSGVHTFPAVLQSSGLYSLSSVVTVPSSSLGTQTYICNVNHKPSNTKVDKKVEPKSCDKTH

SEQ ID NO: 731 - protein, 214 aa, synthetic construct
  REGION 1..214: note = Synthetic
AIQMTQSPSSLSASVGDRVTITCRASQGIRNDLGWYQQKPGKAPKLLIYAASTLQSGVPSRFSGSGSGTDFTLTISSLQPEDFATYYCLQDYNYPFTFGPGTKVDIKRTVAAPSVFIFPPSDEQLKSGTASVVCLLNNFYPREAKVQWKVDNALQSGNSQESVTEQDSKDSTYSLSSTLTLSKADYEKHKVYACEVTHQGLSSPVTKSFNRGEC

SEQ ID NO: 732 - protein, 227 aa, synthetic construct
  REGION 1..227: note = Synthetic
QVTLRESGPALVKPSQTLTLTCTFSGFSLNTYGMFVSWIRQPPGKALEWLAHIHWDDDKYYSTSLKTRLTISKDTSKNQVVLTMTNMDPVDTATYYCARGHNNLNYIIHWGQGTLVTVSSASTKGPSVFPLAPSSKSTSGGTAALGCLVKDYFPEPVTVSWNSGALTSGVHTFPAVLQSSGLYSLSSVVTVPSSSLGTQTYICNVNHKPSNTKVDKKVEPKSCDKTH

SEQ ID NO: 733 - protein, 214 aa, synthetic construct
  REGION 1..214: note = Synthetic
EIVMTQSPATLSVSPGERATLSCRASQSVSSNFAWYQQKPGQAPRLLIYSASSRATGIPVRFSGSGSGTEFTLTISSLQSEDFAVYYCQQYNIWPRTFGQGTKVEIKRTVAAPSVFIFPPSDEQLKSGTASVVCLLNNFYPREAKVQWKVDNALQSGNSQESVTEQDSKDSTYSLSSTLTLSKADYEKHKVYACEVTHQGLSSPVTKSFNRGEC

SEQ ID NO: 734 - protein, 223 aa, synthetic construct
  REGION 1..223: note = Synthetic
EVQLVESGGGLVQPGGSLRLSCAVSGFIFSSYEMNWVRQAPGKGLEWVSYISSSGSTIFYADSVKGRFTISRDNAKNSLYLQMNSLRAEDTAVYYCVSGVVLFDVWGQGTMVTVSSASTKGPSVFPLAPSSKSTSGGTAALGCLVKDYFPEPVTVSWNSGALTSGVHTFPAVLQSSGLYSLSSVVTVPSSSLGTQTYICNVNHKPSNTKVDKKVEPKSCDKTH

SEQ ID NO: 735 - protein, 214 aa, synthetic construct
  REGION 1..214: note = Synthetic
DIQMTQSPSSVSASVGDRVTITCRASQGISSWLAWYQQKPGKAPKLLIYAASSLQSGVPSRFSGSGSGTDFTLTISSLQPEDFATYYCQKANSFPYTFGQGTKLEIKRTVAAPSVFIFPPSDEQLKSGTASVVCLLNNFYPREAKVQWKVDNALQSGNSQESVTEQDSKDSTYSLSSTLTLSKADYEKHKVYACEVTHQGLSSPVTKSFNRGEC

SEQ ID NO: 736 - protein, 232 aa, synthetic construct
  REGION 1..232: note = Synthetic
EVQLVESGGGLVQPGGSLRLSCAASGFTFSNYWMTWVRQAPGKGLEWVANIKEDGSEKDYVDSVKGRFTISRDNAKNSLYLQMNSLRGEDTAVYYCARDGEQLVDYYYYYVMDVWGQGTTVTVSSASTKGPSVFPLAPSSKSTSGGTAALGCLVKDYFPEPVTVSWNSGALTSGVHTFPAVLQSSGLYSLSSVVTVPSSSLGTQTYICNVNHKPSNTKVDKKVEPKSCDKTH

SEQ ID NO: 737 - protein, 214 aa, synthetic construct
  REGION 1..214: note = Synthetic
DIQMTQSPSSLSASVGDRVTITCRASQSISSYLNWYQQKPGKAPKVLIYAASSLQSGVPSRFSGSGSGTDFTLTISSLQPEDFATYYCQQSYSIPLTFGGGTKVEIKRTVAAPSVFIFPPSDEQLKSGTASVVCLLNNFYPREAKVQWKVDNALQSGNSQESVTEQDSKDSTYSLSSTLTLSKADYEKHKVYACEVTHQGLSSPVTKSFNRGEC

SEQ ID NO: 738 - protein, 234 aa, synthetic construct
  REGION 1..234: note = Synthetic
EVQLVESGGGLVQPGRSLRLSCAASGFTFDDYAMHWVRQAPGKGLEWVSGISWNSGYIGYADSVKGRFTISRDNAENSLHLQMNSLRAEDTALYYCARGGSTLVRGVKGGYYGMDVWGQGTTVTVSSASTKGPSVFPLAPSSKSTSGGTAALGCLVKDYFPEPVTVSWNSGALTSGVHTFPAVLQSSGLYSLSSVVTVPSSSLGTQTYICNVNHKPSNTKVDKKVEPKSCDKTH

SEQ ID NO: 739 - protein, 214 aa, synthetic construct
  REGION 1..214: note = Synthetic
DIQMTQSPSSLSASVGDRVTITCRASQSIDRYLNWYRQKPGKAPKLLIYTTSSLQSGVPSRFSGSGSGTDFTLTLSSLQPEDFATYYCQQSYSPPLTFGGGTKVEIKRTVAAPSVFIFPPSDEQLKSGTASVVCLLNNFYPREAKVQWKVDNALQSGNSQESVTEQDSKDSTYSLSSTLTLSKADYEKHKVYACEVTHQGLSSPVTKSFNRGEC

SEQ ID NO: 740 - protein, 224 aa, synthetic construct
  REGION 1..224: note = Synthetic
QVQLVESGGGVVQPGRSLRLSCAASGFTFSSYGMHWVRQAPGKGLEWVAVIWYDGSNKYYADSVKGRFTISRDISKNTLYLQMNSLRAEDTAVYYCAGQLDLFFDYWGQGTLVTVSSASTKGPSVFPLAPSSKSTSGGTAALGCLVKDYFPEPVTVSWNSGALTSGVHTFPAVLQSSGLYSLSSVVTVPSSSLGTQTYICNVNHKPSNTKVDKKVEPKSCDKTH

SEQ ID NO: 741 - protein, 214 aa, synthetic construct
  REGION 1..214: note = Synthetic
DIQMTQSPSSVSASVGDRVTITCRASQGISSWLAWYQQKPGKAPKLLIYAASSLQSGVPSRFSGSGSGTDFTLTISSLQPEDFATYYCQKADSLPYAFGQGTKLEIKRTVAAPSVFIFPPSDEQLKSGTASVVCLLNNFYPREAKVQWKVDNALQSGNSQESVTEQDSKDSTYSLSSTLTLSKADYEKHKVYACEVTHQGLSSPVTKSFNRGEC

SEQ ID NO: 742 - protein, 232 aa, synthetic construct
  REGION 1..232: note = Synthetic
EVQLVESGGGLVQPGGSLRLSCTASGFTFSNYWMTWVRQAPGKGLEWVANIKEDGSEKEYVDSVKGRFTISRDNAKNSLYLQMNSLRGEDTAVYYCARDGEQLVDYYYYYVMDVWGQGTTVTVSSASTKGPSVFPLAPSSKSTSGGTAALGCLVKDYFPEPVTVSWNSGALTSGVHTFPAVLQSSGLYSLSSVVTVPSSSLGTQTYICNVNHKPSNTKVDKKVEPKSCDKTH

SEQ ID NO: 743 - protein, 214 aa, synthetic construct
  REGION 1..214: note = Synthetic
DIQMTQSPSSLSASVGDRVTITCRASQGIRDHFGWYQQKPGKAPKRLIYAASSLHSGVPSRFSGSGSGTEFTLTISSLQPEDFATYYCLQYDTYPLTFGGGTKVEIKRTVAAPSVFIFPPSDEQLKSGTASVVCLLNNFYPREAKVQWKVDNALQSGNSQESVTEQDSKDSTYSLSSTLTLSKADYEKHKVYACEVTHQGLSSPVTKSFNRGEC

SEQ ID NO: 744 - protein, 228 aa, synthetic construct
  REGION 1..228: note = Synthetic
EVQLVESGGGLVQPGGSLRLSCATSGFTFTSYDMKWVRQAPGLGLEWVSAISGSGGNTYYADSVKGRFTISRDNSRNTLYLQMNSLRAEDTAVYYCTRSHDFGAFDYFDYWGQGTLVTVSSASTKGPSVFPLAPSSKSTSGGTAALGCLVKDYFPEPVTVSWNSGALTSGVHTFPAVLQSSGLYSLSSVVTVPSSSLGTQTYICNVNHKPSNTKVDKKVEPKSCDKTH

SEQ ID NO: 745 - protein, 215 aa, synthetic construct
  REGION 1..215: note = Synthetic
EIVMTQSPATLSVSPGERATLSCRASQTVSSNLAWYQQKPGQAPRLLIYGSSSRATGIPARFSGSGSGTEFTLTISSLQSEDFAVYYCQQYNNWPPYTFGQGTKLEIKRTVAAPSVFIFPPSDEQLKSGTASVVCLLNNFYPREAKVQWKVDNALQSGNSQESVTEQDSKDSTYSLSSTLTLSKADYEKHKVYACEVTHQGLSSPVTKSFNRGEC

SEQ ID NO: 746 - protein, 229 aa, synthetic construct
  REGION 1..229: note = Synthetic
EVQLVESGGDLVQPGRSLRLSCAASGFTFDDYAMHWVRQAPGKGLEWVSGISWNSATRVYADSVKGRFTISRDNAKNFLYLQMNSLRSEDTALYHCAKDMDISLGYYGLDVWGQGTTVTVSSASTKGPSVFPLAPSSKSTSGGTAALGCLVKDYFPEPVTVSWNSGALTSGVHTFPAVLQSSGLYSLSSVVTVPSSSLGTQTYICNVNHKPSNTKVDKKVEPKSCDKTH

SEQ ID NO: 747 - protein, 214 aa, synthetic construct
  REGION 1..214: note = Synthetic
DIQMTQSPSSVSASVGDRVTITCRASQGIASWLAWYQQKPGKAPELLIYAASSLQGGVPSRFSGSGSGTDFTLTISSLQPEDFAIYYCQQANYFPWTFGQGTKVEIKRTVAAPSVFIFPPSDEQLKSGTASVVCLLNNFYPREAKVQWKVDNALQSGNSQESVTEQDSKDSTYSLSSTLTLSKADYEKHKVYACEVTHQGLSSPVTKSFNRGEC

SEQ ID NO: 748 - protein, 231 aa, synthetic construct
  REGION 1..231: note = Synthetic
QITLKESGPTLVKPTQTLTLTCTFSGFSLSTSGVGVVWIRQPPGKALEWLALIYWNDHKRYSPSLGSRLTITKDTSKNQVVLTMTNMDPVDTATYYCAHYSGSYSYYYYGLDVWGQGTTVTVSSASTKGPSVFPLAPSSKSTSGGTAALGCLVKDYFPEPVTVSWNSGALTSGVHTFPAVLQSSGLYSLSSVVTVPSSSLGTQTYICNVNHKPSNTKVDKKVEPKSCDKTH

SEQ ID NO: 749 - protein, 214 aa, synthetic construct
  REGION 1..214: note = Synthetic
DIQMTQSPSSLSASVGDRVTITCRASQGIRTDLGWYQQKPGKAPKRLIYAASSLQSGVPSRFSGSGSGTEFTLTISSLRPEDFATFYCLQYNSYPLTFGGGTKVEIKRTVAAPSVFIFPPSDEQLKSGTASVVCLLNNFYPREAKVQWKVDNALQSGNSQESVTEQDSKDSTYSLSSTLTLSKADYEKHKVYACEVTHQGLSSPVTKSFNRGEC

SEQ ID NO: 750 - protein, 228 aa, synthetic construct
  REGION 1..228: note = Synthetic
EVQLLESGGALVQPGGSLRLSCAASGFTFTSYAMHWVRQAPGKGLEWVSSIRGSGGGTYSADSVKGRFTISRDNSRDTLYLQMNSVRAEDTAVYYCARSHDYGAFDFFDYWGQGTLVTVSSASTKGPSVFPLAPSSKSTSGGTAALGCLVKDYFPEPVTVSWNSGALTSGVHTFPAVLQSSGLYSLSSVVTVPSSSLGTQTYICNVNHKPSNTKVDKKVEPKSCDKTH

SEQ ID NO: 751 - protein, 214 aa, synthetic construct
  REGION 1..214: note = Synthetic
EIVMTQSPATLSVSPGERATLSCRASQSVSINLAWYQQKPGQAPRLLIFVASTRATGIPARFSGSGSGTEFTLTISSLQSEDFATYYCQQYDIWPYTFGQGTKLEIKRTVAAPSVFIFPPSDEQLKSGTASVVCLLNNFYPREAKVQWKVDNALQSGNSQESVTEQDSKDSTYSLSSTLTLSKADYEKHKVYACEVTHQGLSSPVTKSFNRGEC

SEQ ID NO: 752 - protein, 223 aa, synthetic construct
  REGION 1..223: note = Synthetic
QVQLVESGGGLVKPGGSLRLSCAASGFTFSDYFMSWIRQAPGKGLEWVSYISSTGSTINYADSVKGRFTISRDNVKNSLYLQMTSLRVEDTAVYYCTRDNWNYEYWGQGTLVTVSSASTKGPSVFPLAPSSKSTSGGTAALGCLVKDYFPEPVTVSWNSGALTSGVHTFPAVLQSSGLYSLSSVVTVPSSSLGTQTYICNVNHKPSNTKVDKKVEPKSCDKTH

SEQ ID NO: 753 - protein, 214 aa, synthetic construct
  REGION 1..214: note = Synthetic
DIQMTQSPSSLSASVGDRVTINCRASQGIRNDLGWYQQKPGKAPKRLIYAASSLQSGVPLRFSGSGSGTEFTLTINNLQPEDFATYYCLSHNSYPWTFGQGTKVEIKRTVAAPSVFIFPPSDEQLKSGTASVVCLLNNFYPREAKVQWKVDNALQSGNSQESVTEQDSKDSTYSLSSTLTLSKADYEKHKVYACEVTHQGLSSPVTKSFNRGEC

SEQ ID NO: 754 - protein, 230 aa, synthetic construct
  REGION 1..230: note = Synthetic
QLQLQESGPGLVKPSETLSLTCTVSGESISSNTYYWGWIRQPPGKGLEWIGSIDYSGTTNYNPSLKSRVTISVDTSRNHFSLRLRSVTAADTAVYYCAREWGNYGYYYGMDVWGQGTTVTVSSASTKGPSVFPLAPSSKSTSGGTAALGCLVKDYFPEPVTVSWNSGALTSGVHTFPAVLQSSGLYSLSSVVTVPSSSLGTQTYICNVNHKPSNTKVDKKVEPKSCDKTH

SEQ ID NO: 755 - protein, 214 aa, synthetic construct
  REGION 1..214: note = Synthetic
DIQMTQSPPSVSASVGDRVTITCRASQGISSWLAWYQQKPGKAPKLLIYAASSLQSGVPSRFSGSGSGTDFTLTISSLQPEDFATYYCQQANSFPRTFGQGTKVEIKRTVAAPSVFIFPPSDEQLKSGTASVVCLLNNFYPREAKVQWKVDNALQSGNSQESVTEQDSKDSTYSLSSTLTLSKADYEKHKVYACEVTHQGLSSPVTKSFNRGEC

SEQ ID NO: 756 - protein, 225 aa, synthetic construct
  REGION 1..225: note = Synthetic
QVQLVQSGAEVKKPGSSVRVSCKASRGTFSSYAISWVRQAPGQGLEWMGGIIPIFGTANYAQKFLARVTITADESTSTAYMELSSLRSEDTAVYYCAREKGWNYFDYWGQGTLVTVSSASTKGPSVFPLAPSSKSTSGGTAALGCLVKDYFPEPVTVSWNSGALTSGVHTFPAVLQSSGLYSLSSVVTVPSSSLGTQTYICNVNHKPSNTKVDKKVEPKSCDKTH

SEQ ID NO: 757 - protein, 219 aa, synthetic construct
  REGION 1..219: note = Synthetic
DIVMTQSPLSLPVTPGEPASISCRSSQSLLHGNGYNYLTWYLQKPGQSPQLLIYLGSNRASGVPDRFSGSGSGTDFTLKISRVEAEDVGVYYCMQALQTPYTFGQGTKLEIKRTVAAPSVFIFPPSDEQLKSGTASVVCLLNNFYPREAKVQWKVDNALQSGNSQESVTEQDSKDSTYSLSSTLTLSKADYEKHKVYACEVTHQGLSSPVTKSFNRGEC

SEQ ID NO: 758 - protein, 230 aa, synthetic construct
  REGION 1..230: note = Synthetic
QVQLVESGGGLVKPGGSLRLSCAASGFTFSDYYMNWIRQAPGKGLEWVSYISSSGTTIYYADSVKGRFTISRDNAKKSLYLEMNSLRAEDTAVYYCAREGYGNDYYYYGIDVWGQGTTVTVSSASTKGPSVFPLAPSSKSTSGGTAALGCLVKDYFPEPVTVSWNSGALTSGVHTFPAVLQSSGLYSLSSVVTVPSSSLGTQTYICNVNHKPSNTKVDKKVEPKSCDKTH

SEQ ID NO: 759 - protein, 215 aa, synthetic construct; identical to SEQ ID NO: 43
  REGION 1..215: note = Synthetic

SEQ ID NO: 760 - protein, 229 aa, synthetic construct
  REGION 1..229: note = Synthetic
QVQLVESGGGVVQPGRSLRLSCAASGFTFSSFGMHWVRQAPGKGLEWVIFISYDGSDKYYADSVKGRFAISRDSSKNTLYLQMNSLRAEDTAVYYCAKENGILTDSYGMDVWGQGTTVTVSSASTKGPSVFPLAPSSKSTSGGTAALGCLVKDYFPEPVTVSWNSGALTSGVHTFPAVLQSSGLYSLSSVVTVPSSSLGTQTYICNVNHKPSNTKVDKKVEPKSCDKTH

SEQ ID NO: 761 - protein, 215 aa, synthetic construct; identical to SEQ ID NO: 43
  REGION 1..215: note = Synthetic

SEQ ID NO: 762 - protein, 231 aa, synthetic construct
  REGION 1..231: note = Synthetic
QVQLVQSGAEVKKPGASVKVSCKASGYTFTSYGISWVRQAPGQGLEWMGWISVYHGNTNYAQKFQGRVTMTTDTSTSTAYMELRSLRSDDTAVYYCAREGYYDFWSGYYPFDYWGQGTLVTVSSASTKGPSVFPLAPSSKSTSGGTAALGCLVKDYFPEPVTVSWNSGALTSGVHTFPAVLQSSGLYSLSSVVTVPSSSLGTQTYICNVNHKPSNTKVDKKVEPKSCDKTH

SEQ ID NO: 763 - protein, 215 aa, synthetic construct; identical to SEQ ID NO: 43
  REGION 1..215: note = Synthetic

SEQ ID NO: 764 - protein, 225 aa, synthetic construct
  REGION 1..225: note = Synthetic
EVQLVESGGGLIQPGGSLRLSCEASGFTFRNYEMNWVRQAPGKGLEWVSYISSSGNMKDYAESVKGRFTISRDNVKNSLQLQMNSLRVEDTAVYYCARDEFPYGMDVWGQGTTVTVSSASTKGPSVFPLAPSSKSTSGGTAALGCLVKDYFPEPVTVSWNSGALTSGVHTFPAVLQSSGLYSLSSVVTVPSSSLGTQTYICNVNHKPSNTKVDKKVEPKSCDKTH

SEQ ID NO: 765 - protein, 215 aa, synthetic construct; identical to SEQ ID NO: 43
  REGION 1..215: note = Synthetic

SEQ ID NO: 766 - protein, 228 aa, synthetic construct
  REGION 1..228: note = Synthetic
EVQLVESGGGLVQPGRSLRLSCAASGFTFDDYAMNWVRQAPGKGLEWVSGISWSSGSMDYADSVKGRFTISRDNAKNSLYLQMNSLRTEDTALYYCAKAREVGDYYGMDVWGQGTTVTVSSASTKGPSVFPLAPSSKSTSGGTAALGCLVKDYFPEPVTVSWNSGALTSGVHTFPAVLQSSGLYSLSSVVTVPSSSLGTQTYICNVNHKPSNTKVDKKVEPKSCDKTH

SEQ ID NO: 767 - protein, 215 aa, synthetic construct
  REGION 1..215: note = Synthetic
EIVLTQSPGTLSLSPGERATLSCRASQSVSSSYLAWYQQKPGQAPRLLIYGASSRATGIPDRFSGSGSGTDFTLTISRLEPEDFAVYYCQQYGSSPWTFGQGTKVEIKRTVAAPSVFIFPPSDEQLKSGTASVVCLLNNFYPREAKVQWKVDNALQSGNSQESVTEQDSKDSTYSLSSTLTLSKADYEKHKVYACEVTHQGLSSPVTKSFNRGEC

SEQ ID NO: 768 - protein, 226 aa, synthetic construct
  REGION 1..226: note = Synthetic
EVQLVESGGGLVQPGRSLTLSCAASGFTFDNFGMHWVRQGPGKGLEWVSGLTWNSGVIGYADSVKGRFTISRDNAKNSLYLQMNSLRPEDTALYYCAKDIRNYGPFDYWGQGTLVTVSSASTKGPSVFPLAPSSKSTSGGTAALGCLVKDYFPEPVTVSWNSGALTSGVHTFPAVLQSSGLYSLSSVVTVPSSSLGTQTYICNVNHKPSNTKVDKKVEPKSCDKTH

SEQ ID NO: 769 - protein, 215 aa, synthetic construct; identical to SEQ ID NO: 43
  REGION 1..215: note = Synthetic

SEQ ID NO: 770 - protein, 226 aa, synthetic construct
  REGION 1..226: note = Synthetic
EVQLVESGGGLVQPGGSLRLSCAASGFTFNIFEMNWVRQAPGKGLEWISYISSRGTTTYYADSVRGRFTISRDNAKNSLYLQMNSLRAEDTAVYYCARDYEATIPFDFWGQGTLVTVSSASTKGPSVFPLAPSSKSTSGGTAALGCLVKDYFPEPVTVSWNSGALTSGVHTFPAVLQSSGLYSLSSVVTVPSSSLGTQTYICNVNHKPSNTKVDKKVEPKSCDKTH

SEQ ID NO: 771 - protein, 215 aa, synthetic construct; identical to SEQ ID NO: 43
  REGION 1..215: note = Synthetic

SEQ ID NO: 772 - protein, 228 aa, synthetic construct
  REGION 1..228: note = Synthetic
EVQLVESGGSVVRPGGSLRLSCEASGFTFDDYGMSWVRQDPGKGLEWVSGINWNGDRTNYADSVKGRFIISRDNAKNSVYLQMNSLRAEDSALYHCARDQGLGVAATLDYWGQGTLVTVSSASTKGPSVFPLAPSSKSTSGGTAALGCLVKDYFPEPVTVSWNSGALTSGVHTFPAVLQSSGLYSLSSVVTVPSSSLGTQTYICNVNHKPSNTKVDKKVEPKSCDKTH

SEQ ID NO: 773 - protein, 215 aa, synthetic construct; identical to SEQ ID NO: 43
  REGION 1..215: note = Synthetic

SEQ ID NO: 774 - protein, 235 aa, synthetic construct
  REGION 1..235: note = Synthetic
EVQLVESGGGLVQPGGSLRLSCAASGFTVSNYEMNWVRQAPGKGLEWVSYISSSTSNIYYADSVKGRFTISRDNAENSLYLQMNSLRVEDTAVYYCVRDGIVVVPVGRGYYYYGLDVWGQGTTVTVSSASTKGPSVFPLAPSSKSTSGGTAALGCLVKDYFPEPVTVSWNSGALTSGVHTFPAVLQSSGLYSLSSVVTVPSSSLGTQTYICNVNHKPSNTKVDKKVEPKSCDKTH

SEQ ID NO: 775 - protein, 215 aa, synthetic construct; identical to SEQ ID NO: 43
  REGION 1..215: note = Synthetic

SEQ ID NO: 776 - protein, 233 aa, synthetic construct
  REGION 1..233: note = Synthetic
QVQLVESGGGVVQPGRSLRLSCAASGFPFSNYVMYWVRQAPGKGLEWVALIFFDGKKNYHADSVKGRFTITRDNSKNMLYLQMNSLRPEDAAVYYCAKIHCPNGVCYKGYYGMDVWGQGTTVTVSSASTKGPSVFPLAPSSKSTSGGTAALGCLVKDYFPEPVTVSWNSGALTSGVHTFPAVLQSSGLYSLSSVVTVPSSSLGTQTYICNVNHKPSNTKVDKKVEPKSCDKTH

SEQ ID NO: 777 - protein, 215 aa, synthetic construct; identical to SEQ ID NO: 43
  REGION 1..215: note = Synthetic

SEQ ID NO: 778 - protein, 232 aa, synthetic construct
  REGION 1..232: note = Synthetic
EVQLVESGGGLVQPGGSLRLSCAASGFTFSNYWMNWVRQAPGKGLEWVANIKEDGGKKLYVDSVKGRFTISRDNAKNSLFLQMNSLRAEDTAVYYCAREDTTLVVDYYYYGMDVWGQGTTVTVSSASTKGPSVFPLAPSSKSTSGGTAALGCLVKDYFPEPVTVSWNSGALTSGVHTFPAVLQSSGLYSLSSVVTVPSSSLGTQTYICNVNHKPSNTKVDKKVEPKSCDKTH

SEQ ID NO: 779 - protein, 215 aa, synthetic construct; identical to SEQ ID NO: 767
  REGION 1..215: note = Synthetic

SEQ ID NO: 780 - protein, 229 aa, synthetic construct
  REGION 1..229: note = Synthetic
QVQLVQSGAEVKKPGSSVKVSCKASGGTFNTYAITWVRQAPGQGLEWMGGIIPISGIAEYAQKFQGRVTITTDDSSTTAYMELNSLRSEDTAVYYCASWNYALYYFYGMDVWGRGTTVTVSSASTKGPSVFPLAPSSKSTSGGTAALGCLVKDYFPEPVTVSWNSGALTSGVHTFPAVLQSSGLYSLSSVVTVPSSSLGTQTYICNVNHKPSNTKVDKKVEPKSCDKTH

SEQ ID NO: 781 - protein, 219 aa, synthetic construct
  REGION 1..219: note = Synthetic
DIVMTQSPLSLPVTPGEPASISCRSSQSLLHSNGYNYLDWYLQKPGQSPQFLIYLGSNRASGVPDRFSGSGSGTDFTLKINRVEAEDVGVYYCMQALQTPYTFGQGTKLEIKRTVAAPSVFIFPPSDEQLKSGTASVVCLLNNFYPREAKVQWKVDNALQSGNSQESVTEQDSKDSTYSLSSTLTLSKADYEKHKVYACEVTHQGLSSPVTKSFNRGEC

SEQ ID NO: 782 - protein, 230 aa, synthetic construct
  REGION 1..230: note = Synthetic
QVQLVESGGGLVKPGGSLRLSCAASGFTFSVYYMNWIRQAPGKGLEWVSYISSSGSTIYYADSVKGRFTISRDNAKNSLYLQMNSLRAEDTAVYYCGREGYSGTYSYYGMDVWGQGTTVTVSSASTKGPSVFPLAPSSKSTSGGTAALGCLVKDYFPEPVTVSWNSGALTSGVHTFPAVLQSSGLYSLSSVVTVPSSSLGTQTYICNVNHKPSNTKVDKKVEPKSCDKTH

SEQ ID NO: 783 - protein, 214 aa, synthetic construct
  REGION 1..214: note = Synthetic
DIQMTQSPSSLSASVGDRVTITCRASQDISHYSAWYQQKPGKLPNLLIYAASTLQSGVPSRFSGSGSGTDFSLTTSSLQPEDVATYYCQKYNSVPLTFGGGTKVEIKRTVAAPSVFIFPPSDEQLKSGTASVVCLLNNFYPREAKVQWKVDNALQSGNSQESVTEQDSKDSTYSLSSTLTLSKADYEKHKVYACEVTHQGLSSPVTKSFNRGEC

SEQ ID NO: 784 - protein, 229 aa, synthetic construct
  REGION 1..229: note = Synthetic
EVQLVESGGGLVQPGRSLRLSCAVSGFTFDDYAMHWVRQAPGKGLEWVSGISWNSGTRGYADSVKGRFTISRDNAKNSLYLQMNSLRGEDTALYYCVKDITISPNYYGMDVWGQGTTVTVSSASTKGPSVFPLAPSSKSTSGGTAALGCLVKDYFPEPVTVSWNSGALTSGVHTFPAVLQSSGLYSLSSVVTVPSSSLGTQTYICNVNHKPSNTKVDKKVEPKSCDKTH

SEQ ID NO: 785 - protein, 233 aa, synthetic construct
  REGION 1..233: note = Synthetic
EVQLVESGGDLVQPGRSLRLSCAASGFTFDDYAMHWVRQAPGKGLEWVSGISWNSATRVYADSVKGRFTISRDNAKNFLYLQMNSLRSEDTALYHCAKDMDISLGYYGLDVWGQGTTVTVSSASTKGPSVFPLAPCSRSTSESTAALGCLVKDYFPEPVTVSWNSGALTSGVHTFPAVLQSSGLYSLSSVVTVPSSSLGTKTYTCNVDHKPSNTKVDKRVESKYGPPLLQGSG

SEQ ID NO: 786 - protein, 235 aa, synthetic construct
  REGION 1..235: note = Synthetic
QITLKESGPTLVKPTQTLTLTCTFSGFSLSTSGVGVVWIRQPPGKALEWLALIYWNDHKRYSPSLGSRLTITKDTSKNQVVLTMTNMDPVDTATYYCAHYSGSYSYYYYGLDVWGQGTTVTVSSASTKGPSVFPLAPCSRSTSESTAALGCLVKDYFPEPVTVSWNSGALTSGVHTFPAVLQSSGLYSLSSVVTVPSSSLGTKTYTCNVDHKPSNTKVDKRVESKYGPPLLQGSG

SEQ ID NO: 787 - protein, 232 aa, synthetic construct
  REGION 1..232: note = Synthetic
EVQLVESGGGLVQPGRSLRLSCAASGFTFDDYAMNWVRQAPGKGLEWVSGISWSSGSMDYADSVKGRFTISRDNAKNSLYLQMNSLRTEDTALYYCAKAREVGDYYGMDVWGQGTTVTVSSASTKGPSVFPLAPCSRSTSESTAALGCLVKDYFPEPVTVSWNSGALTSGVHTFPAVLQSSGLYSLSSVVTVPSSSLGTKTYTCNVDHKPSNTKVDKRVESKYGPPLLQGSG

SEQ ID NO: 788 - protein, 230 aa, synthetic construct
  REGION 1..230: note = Synthetic
EVQLVESGGGLVQPGGSLRLSCAASGFTFNIFEMNWVRQAPGKGLEWISYISSRGTTTYYADSVRGRFTISRDNAKNSLYLQMNSLRAEDTAVYYCARDYEATIPFDFWGQGTLVTVSSASTKGPSVFPLAPCSRSTSESTAALGCLVKDYFPEPVTVSWNSGALTSGVHTFPAVLQSSGLYSLSSVVTVPSSSLGTKTYTCNVDHKPSNTKVDKRVESKYGPPLLQGSG

SEQ ID NO: 789 - protein, 239 aa, synthetic construct
  REGION 1..239: note = Synthetic
EVQLVESGGGLVQPGGSLRLSCAASGFTVSNYEMNWVRQAPGKGLEWVSYISSSTSNIYYADSVKGRFTISRDNAENSLYLQMNSLRVEDTAVYYCVRDGIVVVPVGRGYYYYGLDVWGQGTTVTVSSASTKGPSVFPLAPCSRSTSESTAALGCLVKDYFPEPVTVSWNSGALTSGVHTFPAVLQSSGLYSLSSVVTVPSSSLGTKTYTCNVDHKPSNTKVDKRVESKYGPPLLQGSG

SEQ ID NO: 790 - protein, 237 aa, synthetic construct
  REGION 1..237: note = Synthetic
QVQLVESGGGVVQPGRSLRLSCAASGFPFSNYVMYWVRQAPGKGLEWVALIFFDGKKNYHADSVKGRFTITRDNSKNMLYLQMNSLRPEDAAVYYCAKIHCPNGVCYKGYYGMDVWGQGTTVTVSSASTKGPSVFPLAPCSRSTSESTAALGCLVKDYFPEPVTVSWNSGALTSGVHTFPAVLQSSGLYSLSSVVTVPSSSLGTKTYTCNVDHKPSNTKVDKRVESKYGPPLLQGSG

SEQ ID NO: 791 - protein, 29 aa, Mus musculus
MHRPRRRGTRPPPLALLAALLLAARGADA

SEQ ID NO: 792 - protein, 111 aa, synthetic construct
  REGION 1..111: note = Synthetic
ASTKGPSVFPLAPCSRSTSESTAALGCLVKDYFPEPVTVSWNSGALTSGVHTFPAVLQSSGLYSLSSVVTVPSSSLGTKTYTCNVDHKPSNTKVDKRVESKYGPPLLQGSG

SEQ ID NO: 793 - protein, 1136 aa, synthetic construct
  REGION 1..1136: note = Synthetic
DIQMTQSPSSLSASVGDRVTITCRASQGIRDHFGWYQQKPGKAPKRLIYAASSLHSGVPSRFSGSGSGTEFTLTISSLQPEDFATYYCLQYDTYPLTFGGGTKVEIKGGGGSGGGGSGGGGSEVQLVESGGGLVQPGGSLRLSCATSGFTFTSYDMKWVRQAPGLGLEWVSAISGSGGNTYYADSVKGRFTISRDNSRNTLYLQMNSLRAEDTAVYYCTRSHDFGAFDYFDYWGQGTLVTVSSGGGGSGGGGSAHPGRPRAVPTQCDVPPNSRFDCAPDKAITQEQCEARGCCYIPAKQGLQGAQMGQPWCFFPPSYPSYKLENLSSSEMGYTATLTRTTPTFFPKDILTLRLDVMMETENRLHFTIKDPANRRYEVPLETPHVHSRAPSPLYSVEFSEEPFGVIVRRQLDGRVLLNTTVAPLFFADQFLQLSTSLPSQYITGLAEHLSPLMLSTSWTRITLWNRDLAPTPGANLYGSHPFYLALEDGGSAHGVFLLNSNAMDVVLQPSPALSWRSTGGILDVYIFLGPEPKSVVQQYLDVVGYPFMPPYWGLGFHLCRWGYSSTAITRQVVENMTRAHFPLDVQWNDLDYMDSRRDFTFNKDGFRDFPAMVQELHQGGRRYMMIVDPAISSSGPAGSYRPYDEGLRRGVFITNETGQPLIGKVWPGSTAFPDFTNPTALAWWEDMVAEFHDQVPFDGMWIDMNEPSNFIRGSEDGCPNNELENPPYVPGVVGGTLQAATICASSHQFLSTHYNLHNLYGLTEAIASHRALVKARGTRPFVISRSTFAGHGRYAGHWTGDVWSSWEQLASSVPEILQFNLLGVPLVGADVCGFLGNTSEELCVRWTQLGAFYPFMRNHNSLLSLPQEPYSFSEPAQQAMRKALTLRYALLPHLYTLFHQAHVAGETVARPLFLEFPKDSSTWTVDHQLLWGEALLITPVLQAGKAEVTGYFPLGTWYDLQTVPVEALGSLPPPPAAPREPAIHSEGQWVTLPAPLDTINVHLRAGYIIPLQGPGLTTTESRQQPMALAVALTKGGEARGELFWDDGESLEVLERGAYTQVIFLARNNTIVNELVRVTSEGAGLQLQKVTVLGVATAPQQVLSNGVPVSNFTYSPDTKVLDICVSLLMGEQFLVSWC

SEQ ID NO: 794 - protein, 1138 aa, synthetic construct
  REGION 1..1138: note = Synthetic
EIVMTQSPATLSVSPGERATLSCRASQTVSSNLAWYQQKPGQAPRLLIYGSSSRATGIPARFSGSGSGTEFTLTISSLQSEDFAVYYCQQYNNWPPYTFGQGTKLEIKGGGGSGGGGSGGGGSEVQLVESGGDLVQPGRSLRLSCAASGFTFDDYAMHWVRQAPGKGLEWVSGISWNSATRVYADSVKGRFTISRDNAKNFLYLQMNSLRSEDTALYHCAKDMDISLGYYGLDVWGQGTTVTVSSGGGGSGGGGSAHPGRPRAVPTQCDVPPNSRFDCAPDKAITQEQCEARGCCYIPAKQGLQGAQMGQPWCFFPPSYPSYKLENLSSSEMGYTATLTRTTPTFFPKDILTLRLDVMMETENRLHFTIKDPANRRYEVPLETPHVHSRAPSPLYSVEFSEEPFGVIVRRQLDGRVLLNTTVAPLFFADQFLQLSTSLPSQYITGLAEHLSPLMLSTSWTRITLWNRDLAPTPGANLYGSHPFYLALEDGGSAHGVFLLNSNAMDVVLQPSPALSWRSTGGILDVYIFLGPEPKSVVQQYLDVVGYPFMPPYWGLGFHLCRWGYSSTAITRQVVENMTRAHFPLDVQWNDLDYMDSRRDFTFNKDGFRDFPAMVQELHQGGRRYMMIVDPAISSSGPAGSYRPYDEGLRRGVFITNETGQPLIGKVWPGSTAFPDFTNPTALAWWEDMVAEFHDQVPFDGMWIDMNEPSNFIRGSEDGCPNNELENPPYVPGVVGGTLQAATICASSHQFLSTHYNLHNLYGLTEAIASHRALVKARGTRPFVISRSTFAGHGRYAGHWTGDVWSSWEQLASSVPEILQFNLLGVPLVGADVCGFLGNTSEELCVRWTQLGAFYPFMRNHNSLLSLPQEPYSFSEPAQQAMRKALTLRYALLPHLYTLFHQAHVAGETVARPLFLEFPKDSSTWTVDHQLLWGEALLITPVLQAGKAEVTGYFPLGTWYDLQTVPVEALGSLPPPPAAPREPAIHSEGQWVTLPAPLDTINVHLRAGYIIPLQGPGLTTTESRQQPMALAVALTKGGEARGELFWDDGESLEVLERGAYTQVIFLARNNTIVNELVRVTSEGAGLQLQKVTVLGVATAPQQVLSNGVPVSNFTYSPDTKVLDICVSLLMGEQFLVSWC

SEQ ID NO: 795 - protein, 1136 aa, synthetic construct
  REGION 1..1136: note = Synthetic
DIQMTQSPSSLSASVGDRVTITCRASQGIRTDLGWYQQKPGKAPKRLIYAASSLQSGVPSRFSGSGSGTEFTLTISSLRPEDFATFYCLQYNSYPLTFGGGTKVEIKGGGGSGGGGSGGGGSEVQLLESGGALVQPGGSLRLSCAASGFTFTSYAMHWVRQAPGKGLEWVSSIRGSGGGTYSADSVKGRFTISRDNSRDTLYLQMNSVRAEDTAVYYCARSHDYGAFDFFDYWGQGTLVTVSSGGGGSGGGGSAHPGRPRAVPTQCDVPPNSRFDCAPDKAITQEQCEARGCCYIPAKQGLQGAQMGQPWCFFPPSYPSYKLENLSSSEMGYTATLTRTTPTFFPKDILTLRLDVMMETENRLHFTIKDPANRRYEVPLETPHVHSRAPSPLYSVEFSEEPFGVIVRRQLDGRVLLNTTVAPLFFADQFLQLSTSLPSQYITGLAEHLSPLMLSTSWTRITLWNRDLAPTPGANLYGSHPFYLALEDGGSAHGVFLLNSNAMDVVLQPSPALSWRSTGGILDVYIFLGPEPKSVVQQYLDVVGYPFMPPYWGLGFHLCRWGYSSTAITRQVVENMTRAHFPLDVQWNDLDYMDSRRDFTFNKDGFRDFPAMVQELHQGGRRYMMIVDPAISSSGPAGSYRPYDEGLRRGVFITNETGQPLIGKVWPGSTAFPDFTNPTALAWWEDMVAEFHDQVPFDGMWIDMNEPSNFIRGSEDGCPNNELENPPYVPGVVGGTLQAATICASSHQFLSTHYNLHNLYGLTEAIASHRALVKARGTRPFVISRSTFAGHGRYAGHWTGDVWSSWEQLASSVPEILQFNLLGVPLVGADVCGFLGNTSEELCVRWTQLGAFYPFMRNHNSLLSLPQEPYSFSEPAQQAMRKALTLRYALLPHLYTLFHQAHVAGETVARPLFLEFPKDSSTWTVDHQLLWGEALLITPVLQAGKAEVTGYFPLGTWYDLQTVPVEALGSLPPPPAAPREPAIHSEGQWVTLPAPLDTINVHLRAGYIIPLQGPGLTTTESRQQPMALAVALTKGGEARGELFWDDGESLEVLERGAYTQVIFLARNNTIVNELVRVTSEGAGLQLQKVTVLGVATAPQQVLSNGVPVSNFTYSPDTKVLDICVSLLMGEQFLVSWC

SEQ ID NO: 796 - protein, 1131 aa, synthetic construct
  REGION 1..1131: note = Synthetic
EIVMTQSPATLSVSPGERATLSCRASQSVSINLAWYQQKPGQAPRLLIFVASTRATGIPARFSGSGSGTEFTLTISSLQSEDFATYYCQQYDIWPYTFGQGTKLEIKGGGGSGGGGSGGGGSQVQLVESGGGLVKPGGSLRLSCAASGFTFSDYFMSWIRQAPGKGLEWVSYISSTGSTINYADSVKGRFTISRDNVKNSLYLQMTSLRVEDTAVYYCTRDNWNYEYWGQGTLVTVSSGGGGSGGGGSAHPGRPRAVPTQCDVPPNSRFDCAPDKAITQEQCEARGCCYIPAKQGLQGAQMGQPWCFFPPSYPSYKLENLSSSEMGYTATLTRTTPTFFPKDILTLRLDVMMETENRLHFTIKDPANRRYEVPLETPHVHSRAPSPLYSVEFSEEPFGVIVRRQLDGRVLLNTTVAPLFFADQFLQLSTSLPSQYITGLAEHLSPLMLSTSWTRITLWNRDLAPTPGANLYGSHPFYLALEDGGSAHGVFLLNSNAMDVVLQPSPALSWRSTGGILDVYIFLGPEPKSVVQQYLDVVGYPFMPPYWGLGFHLCRWGYSSTAITRQVVENMTRAHFPLDVQWNDLDYMDSRRDFTFNKDGFRDFPAMVQELHQGGRRYMMIVDPAISSSGPAGSYRPYDEGLRRGVFITNETGQPLIGKVWPGSTAFPDFTNPTALAWWEDMVAEFHDQVPFDGMWIDMNEPSNFIRGSEDGCPNNELENPPYVPGVVGGTLQAATICASSHQFLSTHYNLHNLYGLTEAIASHRALVKARGTRPFVISRSTFAGHGRYAGHWTGDVWSSWEQLASSVPEILQFNLLGVPLVGADVCGFLGNTSEELCVRWTQLGAFYPFMRNHNSLLSLPQEPYSFSEPAQQAMRKALTLRYALLPHLYTLFHQAHVAGETVARPLFLEFPKDSSTWTVDHQLLWGEALLITPVLQAGKAEVTGYFPLGTWYDLQTVPVEALGSLPPPPAAPREPAIHSEGQWVTLPAPLDTINVHLRAGYIIPLQGPGLTTTESRQQPMALAVALTKGGEARGELFWDDGESLEVLERGAYTQVIFLARNNTIVNELVRVTSEGAGLQLQKVTVLGVATAPQQVLSNGVPVSNFTYSPDTKVLDICVSLLMGEQFLVSWC

SEQ ID NO: 797 - protein, 1138 aa, synthetic construct
  REGION 1..1138: note = Synthetic
DIQMTQSPSSLSASVGDRVTINCRASQGIRNDLGWYQQKPGKAPKRLIYAASSLQSGVPLRFSGSGSGTEFTLTINNLQPEDFATYYCLSHNSYPWTFGQGTKVEIKGGGGSGGGGSGGGGSQLQLQESGPGLVKPSETLSLTCTVSGESISSNTYYWGWIRQPPGKGLEWIGSIDYSGTTNYNPSLKSRVTISVDTSRNHFSLRLRSVTAADTAVYYCAREWGNYGYYYGMDVWGQGTTVTVSSGGGGSGGGGSAHPGRPRAVPTQCDVPPNSRFDCAPDKAITQEQCEARGCCYIPAKQGLQGAQMGQPWCFFPPSYPSYKLENLSSSEMGYTATLTRTTPTFFPKDILTLRLDVMMETENRLHFTIKDPANRRYEVPLETPHVHSRAPSPLYSVEFSEEPFGVIVRRQLDGRVLLNTTVAPLFFADQFLQLSTSLPSQYITGLAEHLSPLMLSTSWTRITLWNRDLAPTPGANLYGSHPFYLALEDGGSAHGVFLLNSNAMDVVLQPSPALSWRSTGGILDVYIFLGPEPKSVVQQYLDVVGYPFMPPYWGLGFHLCRWGYSSTAITRQVVENMTRAHFPLDVQWNDLDYMDSRRDFTFNKDGFRDFPAMVQELHQGGRRYMMIVDPAISSSGPAGSYRPYDEGLRRGVFITNETGQPLIGKVWPGSTAFPDFTNPTALAWWEDMVAEFHDQVPFDGMWIDMNEPSNFIRGSEDGCPNNELENPPYVPGVVGGTLQAATICASSHQFLSTHYNLHNLYGLTEAIASHRALVKARGTRPFVISRSTFAGHGRYAGHWTGDVWSSWEQLASSVPEILQFNLLGVPLVGADVCGFLGNTSEELCVRWTQLGAFYPFMRNHNSLLSLPQEPYSFSEPAQQAMRKALTLRYALLPHLYTLFHQAHVAGETVARPLFLEFPKDSSTWTVDHQLLWGEALLITPVLQAGKAEVTGYFPLGTWYDLQTVPVEALGSLPPPPAAPREPAIHSEGQWVTLPAPLDTINVHLRAGYIIPLQGPGLTTTESRQQPMALAVALTKGGEARGELFWDDGESLEVLERGAYTQVIFLARNNTIVNELVRVTSEGAGLQLQKVTVLGVATAPQQVLSNGVPVSNFTYSPDTKVLDICVSLLMGEQFLVSWC

SEQ ID NO: 798 - protein, 1133 aa, synthetic construct
  REGION 1..1133: note = Synthetic
DIQMTQSPPSVSASVGDRVTITCRASQGISSWLAWYQQKPGKAPKLLIYAASSLQSGVPSRFSGSGSGTDFTLTISSLQPEDFATYYCQQANSFPRTFGQGTKVEIKGGGGSGGGGSGGGGSQVQLVQSGAEVKKPGSSVRVSCKASRGTFSSYAISWVRQAPGQGLEWMGGIIPIFGTANYAQKFLARVTITADESTSTAYMELSSLRSEDTAVYYCAREKGWNYFDYWGQGTLVTVSSGGGGSGGGGSAHPGRPRAVPTQCDVPPNSRFDCAPDKAITQEQCEARGCCYIPAKQGLQGAQMGQPWCFFPPSYPSYKLENLSSSEMGYTATLTRTTPTFFPKDILTLRLDVMMETENRLHFTIKDPANRRYEVPLETPHVHSRAPSPLYSVEFSEEPFGVIVRRQLDGRVLLNTTVAPLFFADQFLQLSTSLPSQYITGLAEHLSPLMLSTSWTRITLWNRDLAPTPGANLYGSHPFYLALEDGGSAHGVFLLNSNAMDVVLQPSPALSWRSTGGILDVYIFLGPEPKSVVQQYLDVVGYPFMPPYWGLGFHLCRWGYSSTAITRQVVENMTRAHFPLDVQWNDLDYMDSRRDFTFNKDGFRDFPAMVQELHQGGRRYMMIVDPAISSSGPAGSYRPYDEGLRRGVFITNETGQPLIGKVWPGSTAFPDFTNPTALAWWEDMVAEFHDQVPFDGMWIDMNEPSNFIRGSEDGCPNNELENPPYVPGVVGGTLQAATICASSHQFLSTHYNLHNLYGLTEAIASHRALVKARGTRPFVISRSTFAGHGRYAGHWTGDVWSSWEQLASSVPEILQFNLLGVPLVGADVCGFLGNTSEELCVRWTQLGAFYPFMRNHNSLLSLPQEPYSFSEPAQQAMRKALTLRYALLPHLYTLFHQAHVAGETVARPLFLEFPKDSSTWTVDHQLLWGEALLITPVLQAGKAEVTGYFPLGTWYDLQTVPVEALGSLPPPPAAPREPAIHSEGQWVTLPAPLDTINVHLRAGYIIPLQGPGLTTTESRQQPMALAVALTKGGEARGELFWDDGESLEVLERGAYTQVIFLARNNTIVNELVRVTSEGAGLQLQKVTVLGVATAPQQVLSNGVPVSNFTYSPDTKVLDICVSLLMGEQFLVSWC

SEQ ID NO: 799 - protein, 1143 aa, synthetic construct
  REGION 1..1143: note = Synthetic
DIVMTQSPLSLPVTPGEPASISCRSSQSLLHGNGYNYLTWYLQKPGQSPQLLIYLGSNRASGVPDRFSGSGSGTDFTLKISRVEAEDVGVYYCMQALQTPYTFGQGTKLEIKGGGGSGGGGSGGGGSQVQLVESGGGLVKPGGSLRLSCAASGFTFSDYYMNWIRQAPGKGLEWVSYISSSGTTIYYADSVKGRFTISRDNAKKSLYLEMNSLRAEDTAVYYCAREGYGNDYYYYGIDVWGQGTTVTVSSGGGGSGGGGSAHPGRPRAVPTQCDVPPNSRFDCAPDKAITQEQCEARGCCYIPAKQGLQGAQMGQPWCFFPPSYPSYKLENLSSSEMGYTATLTRTTPTFFPKDILTLRLDVMMETENRLHFTIKDPANRRYEVPLETPHVHSRAPSPLYSVEFSEEPFGVIVRRQLDGRVLLNTTVAPLFFADQFLQLSTSLPSQYITGLAEHLSPLMLSTSWTRITLWNRDLAPTPGANLYGSHPFYLALEDGGSAHGVFLLNSNAMDVVLQPSPALSWRSTGGILDVYIFLGPEPKSVVQQYLDVVGYPFMPPYWGLGFHLCRWGYSSTAITRQVVENMTRAHFPLDVQWNDLDYMDSRRDFTFNKDGFRDFPAMVQELHQGGRRYMMIVDPAISSSGPAGSYRPYDEGLRRGVFITNETGQPLIGKVWPGSTAFPDFTNPTALAWWEDMVAEFHDQVPFDGMWIDMNEPSNFIRGSEDGCPNNELENPPYVPGVVGGTLQAATICASSHQFLSTHYNLHNLYGLTEAIASHRALVKARGTRPFVISRSTFAGHGRYAGHWTGDVWSSWEQLASSVPEILQFNLLGVPLVGADVCGFLGNTSEELCVRWTQLGAFYPFMRNHNSLLSLPQEPYSFSEPAQQAMRKALTLRYALLPHLYTLFHQAHVAGETVARPLFLEFPKDSSTWTVDHQLLWGEALLITPVLQAGKAEVTGYFPLGTWYDLQTVPVEALGSLPPPPAAPREPAIHSEGQWVTLPAPLDTINVHLRAGYIIPLQGPGLTTTESRQQPMALAVALTKGGEARGELFWDDGESLEVLERGAYTQVIFLARNNTIVNELVRVTSEGAGLQLQKVTVLGVATAPQQVLSNGVPVSNFTYSPDTKVLDICVSLLMGEQFLVSWC

SEQ ID NO: 800 - protein, 1138 aa, synthetic construct
  REGION 1..1138: note = Synthetic
DIQMTQSPSSLSASVGDRVTITCRASQSISSYLNWYQQKPGKAPKLLIYAASSLQSGVPSRFSGSGSGTDFTLTISSLQPEDFATYYCQQSYSTPPITFGQGTRLEIKGGGGSGGGGSGGGGSQVQLVESGGGVVQPGRSLRLSCAASGFTFSSFGMHWVRQAPGKGLEWVIFISYDGSDKYYADSVKGRFAISRDSSKNTLYLQMNSLRAEDTAVYYCAKENGILTDSYGMDVWGQGTTVTVSSGGGGSGGGGSAHPGRPRAVPTQCDVPPNSRFDCAPDKAITQEQCEARGCCYIPAKQGLQGAQMGQPWCFFPPSYPSYKLENLSSSEMGYTATLTRTTPTFFPKDILTLRLDVMMETENRLHFTIKDPANRRYEVPLETPHVHSRAPSPLYSVEFSEEPFGVIVRRQLDGRVLLNTTVAPLFFADQFLQLSTSLPSQYITGLAEHLSPLMLSTSWTRITLWNRDLAPTPGANLYGSHPFYLALEDGGSAHGVFLLNSNAMDVVLQPSPALSWRSTGGILDVYIFLGPEPKSVVQQYLDVVGYPFMPPYWGLGFHLCRWGYSSTAITRQVVENMTRAHFPLDVQWNDLDYMDSRRDFTFNKDGFRDFPAMVQELHQGGRRYMMIVDPAISSSGPAGSYRPYDEGLRRGVFITNETGQPLIGKVWPGSTAFPDFTNPTALAWWEDMVAEFHDQVPFDGMWIDMNEPSNFIRGSEDGCPNNELENPPYVPGVVGGTLQAATICASSHQFLSTHYNLHNLYGLTEAIASHRALVKARGTRPFVISRSTFAGHGRYAGHWTGDVWSSWEQLASSVPEILQFNLLGVPLVGADVCGFLGNTSEELCVRWTQLGAFYPFMRNHNSLLSLPQEPYSFSEPAQQAMRKALTLRYALLPHLYTLFHQAHVAGETVARPLFLEFPKDSSTWTVDHQLLWGEALLITPVLQAGKAEVTGYFPLGTWYDLQTVPVEALGSLPPPPAAPREPAIHSEGQWVTLPAPLDTINVHLRAGYIIPLQGPGLTTTESRQQPMALAVALTKGGEARGELFWDDGESLEVLERGAYTQVIFLARNNTIVNELVRVTSEGAGLQLQKVTVLGVATAPQQVLSNGVPVSNFTYSPDTKVLDICVSLLMGEQFLVSWC

SEQ ID NO: 801 - protein, 1140 aa, synthetic construct
  REGION 1..1140: note = Synthetic
DIQMTQSPSSLSASVGDRVTITCRASQSISSYLNWYQQKPGKAPKLLIYAASSLQSGVPSRFSGSGSGTDFTLTISSLQPEDFATYYCQQSYSTPPITFGQGTRLEIKGGGGSGGGGSGGGGSQVQLVQSGAEVKKPGASVKVSCKASGYTFTSYGISWVRQAPGQGLEWMGWISVYHGNTNYAQKFQGRVTMTTDTSTSTAYMELRSLRSDDTAVYYCAREGYYDFWSGYYPFDYWGQGTLVTVSSGGGGSGGGGSAHPGRPRAVPTQCDVPPNSRFDCAPDKAITQEQCEARGCCYIPAKQGLQGAQMGQPWCFFPPSYPSYKLENLSSSEMGYTATLTRTTPTFFPKDILTLRLDVMMETENRLHFTIKDPANRRYEVPLETPHVHSRAPSPLYSVEFSEEPFGVIVRRQLDGRVLLNTTVAPLFFADQFLQLSTSLPSQYITGLAEHLSPLMLSTSWTRITLWNRDLAPTPGANLYGSHPFYLALEDGGSAHGVFLLNSNAMDVVLQPSPALSWRSTGGILDVYIFLGPEPKSVVQQYLDVVGYPFMPPYWGLGFHLCRWGYSSTAITRQVVENMTRAHFPLDVQWNDLDYMDSRRDFTFNKDGFRDFPAMVQELHQGGRRYMMIVDPAISSSGPAGSYRPYDEGLRRGVFITNETGQPLIGKVWPGSTAFPDFTNPTALAWWEDMVAEFHDQVPFDGMWIDMNEPSNFIRGSEDGCPNNELENPPYVPGVVGGTLQAATICASSHQFLSTHYNLHNLYGLTEAIASHRALVKARGTRPFVISRSTFAGHGRYAGHWTGDVWSSWEQLASSVPEILQFNLLGVPLVGADVCGFLGNTSEELCVRWTQLGAFYPFMRNHNSLLSLPQEPYSFSEPAQQAMRKALTLRYALLPHLYTLFHQAHVAGETVARPLFLEFPKDSSTWTVDHQLLWGEALLITPVLQAGKAEVTGYFPLGTWYDLQTVPVEALGSLPPPPAAPREPAIHSEGQWVTLPAPLDTINVHLRAGYIIPLQGPGLTTTESRQQPMALAVALTKGGEARGELFWDDGESLEVLERGAYTQVIFLARNNTIVNELVRVTSEGAGLQLQKVTVLGVATAPQQVLSNGVPVSNFTYSPDTKVLDICVSLLMGEQFLVSWC

SEQ ID NO: 802 - protein, 1134 aa, synthetic construct
  REGION 1..1134: note = Synthetic
DIQMTQSPSSLSASVGDRVTITCRASQSISSYLNWYQQKPGKAPKLLIYAASSLQSGVPSRFSGSGSGTDFTLTISSLQPEDFATYYCQQSYSTPPITFGQGTRLEIKGGGGSGGGGSGGGGSEVQLVESGGGLIQPGGSLRLSCEASGFTFRNYEMNWVRQAPGKGLEWVSYISSSGNMKDYAESVKGRFTISRDNVKNSLQLQMNSLRVEDTAVYYCARDEFPYGMDVWGQGTTVTVSSGGGGSGGGGSAHPGRPRAVPTQCDVPPNSRFDCAPDKAITQEQCEARGCCYIPAKQGLQGAQMGQPWCFFPPSYPSYKLENLSSSEMGYTATLTRTTPTFFPKDILTLRLDVMMETENRLHFTIKDPANRRYEVPLETPHVHSRAPSPLYSVEFSEEPFGVIVRRQLDGRVLLNTTVAPLFFADQFLQLSTSLPSQYITGLAEHLSPLMLSTSWTRITLWNRDLAPTPGANLYGSHPFYLALEDGGSAHGVFLLNSNAMDVVLQPSPALSWRSTGGILDVYIFLGPEPKSVVQQYLDVVGYPFMPPYWGLGFHLCRWGYSSTAITRQVVENMTRAHFPLDVQWNDLDYMDSRRDFTFNKDGFRDFPAMVQELHQGGRRYMMIVDPAISSSGPAGSYRPYDEGLRRGVFITNETGQPLIGKVWPGSTAFPDFTNPTALAWWEDMVAEFHDQVPFDGMWIDMNEPSNFIRGSEDGCPNNELENPPYVPGVVGGTLQAATICASSHQFLSTHYNLHNLYGLTEAIASHRALVKARGTRPFVISRSTFAGHGRYAGHWTGDVWSSWEQLASSVPEILQFNLLGVPLVGADVCGFLGNTSEELCVRWTQLGAFYPFMRNHNSLLSLPQEPYSFSEPAQQAMRKALTLRYALLPHLYTLFHQAHVAGETVARPLFLEFPKDSSTWTVDHQLLWGEALLITPVLQAGKAEVTGYFPLGTWYDLQTVPVEALGSLPPPPAAPREPAIHSEGQWVTLPAPLDTINVHLRAGYIIPLQGPGLTTTESRQQPMALAVALTKGGEARGELFWDDGESLEVLERGAYTQVIFLARNNTIVNELVRVTSEGAGLQLQKVTVLGVATAPQQVLSNGVPVSNFTYSPDTKVLDICVSLLMGEQFLVSWC

SEQ ID NO: 803 - protein, 1141 aa, synthetic construct
  REGION 1..1141: note = Synthetic
DIQMTQSPSSLSASVGDRVTITCRASQSISSYLNWYQQKPGKAPKLLIYAASSLQSGVPSRFSGSGSGTDFTLTISSLQPEDFATYYCQQSYSTPPITFGQGTRLEIKGGGGSGGGGSGGGGSEVQLVESGGGLVQPGGSLRLSCAASGFTFSNYWMNWVRQAPGKGLEWVANIKEDGGKKLYVDSVKGRFTISRDNAKNSLFLQMNSLRAEDTAVYYCAREDTTLVVDYYYYGMDVWGQGTTVTVSSGGGGSGGGGSAHPGRPRAVPTQCDVPPNSRFDCAPDKAITQEQCEARGCCYIPAKQGLQGAQMGQPWCFFPPSYPSYKLENLSSSEMGYTATLTRTTPTFFPKDILTLRLDVMMETENRLHFTIKDPANRRYEVPLETPHVHSRAPSPLYSVEFSEEPFGVIVRRQLDGRVLLNTTVAPLFFADQFLQLSTSLPSQYITGLAEHLSPLMLSTSWTRITLWNRDLAPTPGANLYGSHPFYLALEDGGSAHGVFLLNSNAMDVVLQPSPALSWRSTGGILDVYIFLGPEPKSVVQQYLDVVGYPFMPPYWGLGFHLCRWGYSSTAITRQVVENMTRAHFPLDVQWNDLDYMDSRRDFTFNKDGFRDFPAMVQELHQGGRRYMMIVDPAISSSGPAGSYRPYDEGLRRGVFITNETGQPLIGKVWPGSTAFPDFTNPTALAWWEDMVAEFHDQVPFDGMWIDMNEPSNFIRGSEDGCPNNELENPPYVPGVVGGTLQAATICASSHQFLSTHYNLHNLYGLTEAIASHRALVKARGTRPFVISRSTFAGHGRYAGHWTGDVWSSWEQLASSVPEILQFNLLGVPLVGADVCGFLGNTSEELCVRWTQLGAFYPFMRNHNSLLSLPQEPYSFSEPAQQAMRKALTLRYALLPHLYTLFHQAHVAGETVARPLFLEFPKDSSTWTVDHQLLWGEALLITPVLQAGKAEVTGYFPLGTWYDLQTVPVEALGSLPPPPAAPREPAIHSEGQWVTLPAPLDTINVHLRAGYIIPLQGPGLTTTESRQQPMALAVALTKGGEARGELFWDDGESLEVLERGAYTQVIFLARNNTIVNELVRVTSEGAGLQLQKVTVLGVATAPQQVLSNGVPVSNFTYSPDTKVLDICVSLLMGEQFLVSWC

SEQ ID NO: 804 - protein, 1137 aa, synthetic construct
  REGION 1..1137: note = Synthetic
DIQMTQSPSSLSASVGDRVTITCRASQSISSYLNWYQQKPGKAPKLLIYAASSLQSGVPSRFSGSGSGTDFTLTISSLQPEDFATYYCQQSYSTPPITFGQGTRLEIKGGGGSGGGGSGGGGSEVQLVESGGSVVRPGGSLRLSCEASGFTFDDYGMSWVRQDPGKGLEWVSGINWNGDRTNYADSVKGRFIISRDNAKNSVYLQMNSLRAEDSALYHCARDQGLGVAATLDYWGQGTLVTVSSGGGGSGGGGSAHPGRPRAVPTQCDVPPNSRFDCAPDKAITQEQCEARGCCYIPAKQGLQGAQMGQPWCFFPPSYPSYKLENLSSSEMGYTATLTRTTPTFFPKDILTLRLDVMMETENRLHFTIKDPANRRYEVPLETPHVHSRAPSPLYSVEFSEEPFGVIVRRQLDGRVLLNTTVAPLFFADQFLQLSTSLPSQYITGLAEHLSPLMLSTSWTRITLWNRDLAPTPGANLYGSHPFYLALEDGGSAHGVFLLNSNAMDVVLQPSPALSWRSTGGILDVYIFLGPEPKSVVQQYLDVVGYPFMPPYWGLGFHLCRWGYSSTAITRQVVENMTRAHFPLDVQWNDLDYMDSRRDFTFNKDGFRDFPAMVQELHQGGRRYMMIVDPAISSSGPAGSYRPYDEGLRRGVFITNETGQPLIGKVWPGSTAFPDFTNPTALAWWEDMVAEFHDQVPFDGMWIDMNEPSNFIRGSEDGCPNNELENPPYVPGVVGGTLQAATICASSHQFLSTHYNLHNLYGLTEAIASHRALVKARGTRPFVISRSTFAGHGRYAGHWTGDVWSSWEQLASSVPEILQFNLLGVPLVGADVCGFLGNTSEELCVRWTQLGAFYPFMRNHNSLLSLPQEPYSFSEPAQQAMRKALTLRYALLPHLYTLFHQAHVAGETVARPLFLEFPKDSSTWTVDHQLLWGEALLITPVLQAGKAEVTGYFPLGTWYDLQTVPVEALGSLPPPPAAPREPAIHSEGQWVTLPAPLDTINVHLRAGYIIPLQGPGLTTTESRQQPMALAVALTKGGEARGELFWDDGESLEVLERGAYTQVIFLARNNTIVNELVRVTSEGAGLQLQKVTVLGVATAPQQVLSNGVPVSNFTYSPDTKVLDICVSLLMGEQFLVSWC

SEQ ID NO: 805 - protein, 1144 aa, synthetic construct
  REGION 1..1144: note = Synthetic
DIQMTQSPSSLSASVGDRVTITCRASQSISSYLNWYQQKPGKAPKLLIYAASSLQSGVPSRFSGSGSGTDFTLTISSLQPEDFATYYCQQSYSTPPITFGQGTRLEIKGGGGSGGGGSGGGGSEVQLVESGGGLVQPGGSLRLSCAASGFTVSNYEMNWVRQAPGKGLEWVSYISSSTSNIYYADSVKGRFTISRDNAENSLYLQMNSLRVEDTAVYYCVRDGIVVVPVGRGYYYYGLDVWGQGTTVTVSSGGGGSGGGGSAHPGRPRAVPTQCDVPPNSRFDCAPDKAITQEQCEARGCCYIPAKQGLQGAQMGQPWCFFPPSYPSYKLENLSSSEMGYTATLTRTTPTFFPKDILTLRLDVMMETENRLHFTIKDPANRRYEVPLETPHVHSRAPSPLYSVEFSEEPFGVIVRRQLDGRVLLNTTVAPLFFADQFLQLSTSLPSQYITGLAEHLSPLMLSTSWTRITLWNRDLAPTPGANLYGSHPFYLALEDGGSAHGVFLLNSNAMDVVLQPSPALSWRSTGGILDVYIFLGPEPKSVVQQYLDVVGYPFMPPYWGLGFHLCRWGYSSTAITRQVVENMTRAHFPLDVQWNDLDYMDSRRDFTFNKDGFRDFPAMVQELHQGGRRYMMIVDPAISSSGPAGSYRPYDEGLRRGVFITNETGQPLIGKVWPGSTAFPDFTNPTALAWWEDMVAEFHDQVPFDGMWIDMNEPSNFIRGSEDGCPNNELENPPYVPGVVGGTLQAATICASSHQFLSTHYNLHNLYGLTEAIASHRALVKARGTRPFVISRSTFAGHGRYAGHWTGDVWSSWEQLASSVPEILQFNLLGVPLVGADVCGFLGNTSEELCVRWTQLGAFYPFMRNHNSLLSLPQEPYSFSEPAQQAMRKALTLRYALLPHLYTLFHQAHVAGETVARPLFLEFPKDSSTWTVDHQLLWGEALLITPVLQAGKAEVTGYFPLGTWYDLQTVPVEALGSLPPPPAAPREPAIHSEGQWVTLPAPLDTINVHLRAGYIIPLQGPGLTTTESRQQPMALAVALTKGGEARGELFWDDGESLEVLERGAYTQVIFLARNNTIVNELVRVTSEGAGLQLQKVTVLGVATAPQQVLSNGVPVSNFTYSPDTKVLDICVSLLMGEQFLVSWC

SEQ ID NO: 806 - protein, 1135 aa, synthetic construct
  REGION 1..1135: note = Synthetic
EIVLTQSPGTLSLSPGERATLSCRASQSVSSSYLAWYQQKPGQAPRLLIYGASSRATGIPDRFSGSGSGTDFTLTISRLEPEDFAVYYCQQYGSSPWTFGQGTKVEIKGGGGSGGGGSGGGGSEVQLVESGGGLVQPGRSLTLSCAASGFTFDNFGMHWVRQGPGKGLEWVSGLTWNSGVIGYADSVKGRFTISRDNAKNSLYLQMNSLRPEDTALYYCAKDIRNYGPFDYWGQGTLVTVSSGGGGSGGGGSAHPGRPRAVPTQCDVPPNSRFDCAPDKAITQEQCEARGCCYIPAKQGLQGAQMGQPWCFFPPSYPSYKLENLSSSEMGYTATLTRTTPTFFPKDILTLRLDVMMETENRLHFTIKDPANRRYEVPLETPHVHSRAPSPLYSVEFSEEPFGVIVRRQLDGRVLLNTTVAPLFFADQFLQLSTSLPSQYITGLAEHLSPLMLSTSWTRITLWNRDLAPTPGANLYGSHPFYLALEDGGSAHGVFLLNSNAMDVVLQPSPALSWRSTGGILDVYIFLGPEPKSVVQQYLDVVGYPFMPPYWGLGFHLCRWGYSSTAITRQVVENMTRAHFPLDVQWNDLDYMDSRRDFTFNKDGFRDFPAMVQELHQGGRRYMMIVDPAISSSGPAGSYRPYDEGLRRGVFITNETGQPLIGKVWPGSTAFPDFTNPTALAWWEDMVAEFHDQVPFDGMWIDMNEPSNFIRGSEDGCPNNELENPPYVPGVVGGTLQAATICASSHQFLSTHYNLHNLYGLTEAIASHRALVKARGTRPFVISRSTFAGHGRYAGHWTGDVWSSWEQLASSVPEILQFNLLGVPLVGADVCGFLGNTSEELCVRWTQLGAFYPFMRNHNSLLSLPQEPYSFSEPAQQAMRKALTLRYALLPHLYTLFHQAHVAGETVARPLFLEFPKDSSTWTVDHQLLWGEALLITPVLQAGKAEVTGYFPLGTWYDLQTVPVEALGSLPPPPAAPREPAIHSEGQWVTLPAPLDTINVHLRAGYIIPLQGPGLTTTESRQQPMALAVALTKGGEARGELFWDDGESLEVLERGAYTQVIFLARNNTIVNELVRVTSEGAGLQLQKVTVLGVATAPQQVLSNGVPVSNFTYSPDTKVLDICVSLLMGEQFLVSWC

SEQ ID NO: 807 - protein, 1138 aa, synthetic construct
  REGION 1..1138: note = Synthetic
EIVLTQSPGTLSLSPGERATLSCRASQSVSSSYLAWYQQKPGQAPRLLIYGASSRATGIPDRFSGSGSGTDFTLTISRLEPEDFAVYYCQQYGSSPWTFGQGTKVEIKGGGGSGGGGSGGGGSQVQLVQSGAEVKKPGSSVKVSCKASGGTFNTYAITWVRQAPGQGLEWMGGIIPISGIAEYAQKFQGRVTITTDDSSTTAYMELNSLRSEDTAVYYCASWNYALYYFYGMDVWGRGTTVTVSSGGGGSGGGGSAHPGRPRAVPTQCDVPPNSRFDCAPDKAITQEQCEARGCCYIPAKQGLQGAQMGQPWCFFPPSYPSYKLENLSSSEMGYTATLTRTTPTFFPKDILTLRLDVMMETENRLHFTIKDPANRRYEVPLETPHVHSRAPSPLYSVEFSEEPFGVIVRRQLDGRVLLNTTVAPLFFADQFLQLSTSLPSQYITGLAEHLSPLMLSTSWTRITLWNRDLAPTPGANLYGSHPFYLALEDGGSAHGVFLLNSNAMDVVLQPSPALSWRSTGGILDVYIFLGPEPKSVVQQYLDVVGYPFMPPYWGLGFHLCRWGYSSTAITRQVVENMTRAHFPLDVQWNDLDYMDSRRDFTFNKDGFRDFPAMVQELHQGGRRYMMIVDPAISSSGPAGSYRPYDEGLRRGVFITNETGQPLIGKVWPGSTAFPDFTNPTALAWWEDMVAEFHDQVPFDGMWIDMNEPSNFIRGSEDGCPNNELENPPYVPGVVGGTLQAATICASSHQFLSTHYNLHNLYGLTEAIASHRALVKARGTRPFVISRSTFAGHGRYAGHWTGDVWSSWEQLASSVPEILQFNLLGVPLVGADVCGFLGNTSEELCVRWTQLGAFYPFMRNHNSLLSLPQEPYSFSEPAQQAMRKALTLRYALLPHLYTLFHQAHVAGETVARPLFLEFPKDSSTWTVDHQLLWGEALLITPVLQAGKAEVTGYFPLGTWYDLQTVPVEALGSLPPPPAAPREPAIHSEGQWVTLPAPLDTINVHLRAGYIIPLQGPGLTTTESRQQPMALAVALTKGGEARGELFWDDGESLEVLERGAYTQVIFLARNNTIVNELVRVTSEGAGLQLQKVTVLGVATAPQQVLSNGVPVSNFTYSPDTKVLDICVSLLMGEQFLVSWC

SEQ ID NO: 808 - protein, 1136 aa, synthetic construct
  REGION 1..1136: note = Synthetic
DIQMTQSPSSLSASIGDRVTITCRASQGISNYLAWYQQKPGKVPKLLIYAASTLQSGVPSRFSGSGSGTDFTLTISSLQPEDVATYYCQNHNSVPLTFGGGTKVEIKGGGGSGGGGSGGGGSEVQLVESGGGLVQPGGSLRLSCAASGFTFNSYAMTWVRQAPGKGLEWVSFIGGSTGNTYYAGSVKGRFTISSDNSKKTLYLQMNSLRAEDTAVYYCAKGGAARRMEYFQHWGQGTLVTVSSGGGGSGGGGSAHPGRPRAVPTQCDVPPNSRFDCAPDKAITQEQCEARGCCYIPAKQGLQGAQMGQPWCFFPPSYPSYKLENLSSSEMGYTATLTRTTPTFFPKDILTLRLDVMMETENRLHFTIKDPANRRYEVPLETPHVHSRAPSPLYSVEFSEEPFGVIVRRQLDGRVLLNTTVAPLFFADQFLQLSTSLPSQYITGLAEHLSPLMLSTSWTRITLWNRDLAPTPGANLYGSHPFYLALEDGGSAHGVFLLNSNAMDVVLQPSPALSWRSTGGILDVYIFLGPEPKSVVQQYLDVVGYPFMPPYWGLGFHLCRWGYSSTAITRQVVENMTRAHFPLDVQWNDLDYMDSRRDFTFNKDGFRDFPAMVQELHQGGRRYMMIVDPAISSSGPAGSYRPYDEGLRRGVFITNETGQPLIGKVWPGSTAFPDFTNPTALAWWEDMVAEFHDQVPFDGMWIDMNEPSNFIRGSEDGCPNNELENPPYVPGVVGGTLQAATICASSHQFLSTHYNLHNLYGLTEAIASHRALVKARGTRPFVISRSTFAGHGRYAGHWTGDVWSSWEQLASSVPEILQFNLLGVPLVGADVCGFLGNTSEELCVRWTQLGAFYPFMRNHNSLLSLPQEPYSFSEPAQQAMRKALTLRYALLPHLYTLFHQAHVAGETVARPLFLEFPKDSSTWTVDHQLLWGEALLITPVLQAGKAEVTGYFPLGTWYDLQTVPVEALGSLPPPPAAPREPAIHSEGQWVTLPAPLDTINVHLRAGYIIPLQGPGLTTTESRQQPMALAVALTKGGEARGELFWDDGESLEVLERGAYTQVIFLARNNTIVNELVRVTSEGAGLQLQKVTVLGVATAPQQVLSNGVPVSNFTYSPDTKVLDICVSLLMGEQFLVSWC

SEQ ID NO: 809 - protein, 1136 aa, synthetic construct
  REGION 1..1136: note = Synthetic
DIQMTQSPSSLSASVGDRVTITCRASQGISNYLAWYQQKPGKVPNLLIYAASTLQSGVPSRFSGSGSGTDFTLTISSLQPEDVATYYCQKYNSAPLTFGGGTKVEIKGGGGSGGGGSGGGGSEVQLVESGGGLVQPGGSLRLSCAASGFAFSSYAMTWVRQAPGKGLEWVSVISGTGGSTYYADSVKGRFTISRDNSKNTLYLQMNSLRAEDTAVYYCAKGGAARRMEYFQYWGQGTLVTVSSGGGGSGGGGSAHPGRPRAVPTQCDVPPNSRFDCAPDKAITQEQCEARGCCYIPAKQGLQGAQMGQPWCFFPPSYPSYKLENLSSSEMGYTATLTRTTPTFFPKDILTLRLDVMMETENRLHFTIKDPANRRYEVPLETPHVHSRAPSPLYSVEFSEEPFGVIVRRQLDGRVLLNTTVAPLFFADQFLQLSTSLPSQYITGLAEHLSPLMLSTSWTRITLWNRDLAPTPGANLYGSHPFYLALEDGGSAHGVFLLNSNAMDVVLQPSPALSWRSTGGILDVYIFLGPEPKSVVQQYLDVVGYPFMPPYWGLGFHLCRWGYSSTAITRQVVENMTRAHFPLDVQWNDLDYMDSRRDFTFNKDGFRDFPAMVQELHQGGRRYMMIVDPAISSSGPAGSYRPYDEGLRRGVFITNETGQPLIGKVWPGSTAFPDFTNPTALAWWEDMVAEFHDQVPFDGMWIDMNEPSNFIRGSEDGCPNNELENPPYVPGVVGGTLQAATICASSHQFLSTHYNLHNLYGLTEAIASHRALVKARGTRPFVISRSTFAGHGRYAGHWTGDVWSSWEQLASSVPEILQFNLLGVPLVGADVCGFLGNTSEELCVRWTQLGAFYPFMRNHNSLLSLPQEPYSFSEPAQQAMRKALTLRYALLPHLYTLFHQAHVAGETVARPLFLEFPKDSSTWTVDHQLLWGEALLITPVLQAGKAEVTGYFPLGTWYDLQTVPVEALGSLPPPPAAPREPAIHSEGQWVTLPAPLDTINVHLRAGYIIPLQGPGLTTTESRQQPMALAVALTKGGEARGELFWDDGESLEVLERGAYTQVIFLARNNTIVNELVRVTSEGAGLQLQKVTVLGVATAPQQVLSNGVPVSNFTYSPDTKVLDICVSLLMGEQFLVSWC

SEQ ID NO: 810 - protein, 1143 aa, synthetic construct
  REGION 1..1143: note = Synthetic
DIVMTQSPLSLPVTPGEPASISCRSSQSLLHSNGYNYLDWYLQKPGQSPQFLIYLGSNRASGVPDRFSGSGSGTDFTLKINRVEAEDVGVYYCMQALQTPYTFGQGTKLEIKGGGGSGGGGSGGGGSQVQLVESGGGLVKPGGSLRLSCAASGFTFSVYYMNWIRQAPGKGLEWVSYISSSGSTIYYADSVKGRFTISRDNAKNSLYLQMNSLRAEDTAVYYCGREGYSGTYSYYGMDVWGQGTTVTVSSGGGGSGGGGSAHPGRPRAVPTQCDVPPNSRFDCAPDKAITQEQCEARGCCYIPAKQGLQGAQMGQPWCFFPPSYPSYKLENLSSSEMGYTATLTRTTPTFFPKDILTLRLDVMMETENRLHFTIKDPANRRYEVPLETPHVHSRAPSPLYSVEFSEEPFGVIVRRQLDGRVLLNTTVAPLFFADQFLQLSTSLPSQYITGLAEHLSPLMLSTSWTRITLWNRDLAPTPGANLYGSHPFYLALEDGGSAHGVFLLNSNAMDVVLQPSPALSWRSTGGILDVYIFLGPEPKSVVQQYLDVVGYPFMPPYWGLGFHLCRWGYSSTAITRQVVENMTRAHFPLDVQWNDLDYMDSRRDFTFNKDGFRDFPAMVQELHQGGRRYMMIVDPAISSSGPAGSYRPYDEGLRRGVFITNETGQPLIGKVWPGSTAFPDFTNPTALAWWEDMVAEFHDQVPFDGMWIDMNEPSNFIRGSEDGCPNNELENPPYVPGVVGGTLQAATICASSHQFLSTHYNLHNLYGLTEAIASHRALVKARGTRPFVISRSTFAGHGRYAGHWTGDVWSSWEQLASSVPEILQFNLLGVPLVGADVCGFLGNTSEELCVRWTQLGAFYPFMRNHNSLLSLPQEPYSFSEPAQQAMRKALTLRYALLPHLYTLFHQAHVAGETVARPLFLEFPKDSSTWTVDHQLLWGEALLITPVLQAGKAEVTGYFPLGTWYDLQTVPVEALGSLPPPPAAPREPAIHSEGQWVTLPAPLDTINVHLRAGYIIPLQGPGLTTTESRQQPMALAVALTKGGEARGELFWDDGESLEVLERGAYTQVIFLARNNTIVNELVRVTSEGAGLQLQKVTVLGVATAPQQVLSNGVPVSNFTYSPDTKVLDICVSLLMGEQFLVSWC

SEQ ID NO: 811 - protein, 1137 aa, synthetic construct
  REGION 1..1137: note = Synthetic
DIQMTQSPSSLSASVGDRVTITCRASQDISHYSAWYQQKPGKLPNLLIYAASTLQSGVPSRFSGSGSGTDFSLTTSSLQPEDVATYYCQKYNSVPLTFGGGTKVEIKGGGGSGGGGSGGGGSEVQLVESGGGLVQPGRSLRLSCAVSGFTFDDYAMHWVRQAPGKGLEWVSGISWNSGTRGYADSVKGRFTISRDNAKNSLYLQMNSLRGEDTALYYCVKDITISPNYYGMDVWGQGTTVTVSSGGGGSGGGGSAHPGRPRAVPTQCDVPPNSRFDCAPDKAITQEQCEARGCCYIPAKQGLQGAQMGQPWCFFPPSYPSYKLENLSSSEMGYTATLTRTTPTFFPKDILTLRLDVMMETENRLHFTIKDPANRRYEVPLETPHVHSRAPSPLYSVEFSEEPFGVIVRRQLDGRVLLNTTVAPLFFADQFLQLSTSLPSQYITGLAEHLSPLMLSTSWTRITLWNRDLAPTPGANLYGSHPFYLALEDGGSAHGVFLLNSNAMDVVLQPSPALSWRSTGGILDVYIFLGPEPKSVVQQYLDVVGYPFMPPYWGLGFHLCRWGYSSTAITRQVVENMTRAHFPLDVQWNDLDYMDSRRDFTFNKDGFRDFPAMVQELHQGGRRYMMIVDPAISSSGPAGSYRPYDEGLRRGVFITNETGQPLIGKVWPGSTAFPDFTNPTALAWWEDMVAEFHDQVPFDGMWIDMNEPSNFIRGSEDGCPNNELENPPYVPGVVGGTLQAATICASSHQFLSTHYNLHNLYGLTEAIASHRALVKARGTRPFVISRSTFAGHGRYAGHWTGDVWSSWEQLASSVPEILQFNLLGVPLVGADVCGFLGNTSEELCVRWTQLGAFYPFMRNHNSLLSLPQEPYSFSEPAQQAMRKALTLRYALLPHLYTLFHQAHVAGETVARPLFLEFPKDSSTWTVDHQLLWGEALLITPVLQAGKAEVTGYFPLGTWYDLQTVPVEALGSLPPPPAAPREPAIHSEGQWVTLPAPLDTINVHLRAGYIIPLQGPGLTTTESRQQPMALAVALTKGGEARGELFWDDGESLEVLERGAYTQVIFLARNNTIVNELVRVTSEGAGLQLQKVTVLGVATAPQQVLSNGVPVSNFTYSPDTKVLDICVSLLMGEQFLVSWC

SEQ ID NO: 812 - protein, 1132 aa, synthetic construct
  REGION 1..1132: note = Synthetic
DIQMTQSPSSLSASVGDRVTITCRASQSIDRYLNWYRQKPGKAPKLLIYTTSSLQSGVPSRFSGSGSGTDFTLTLSSLQPEDFATYYCQQSYSPPLTFGGGTKVEIKGGGGSGGGGSGGGGSQVQLVESGGGVVQPGRSLRLSCAASGFTFSSYGMHWVRQAPGKGLEWVAVIWYDGSNKYYADSVKGRFTISRDISKNTLYLQMNSLRAEDTAVYYCAGQLDLFFDYWGQGTLVTVSSGGGGSGGGGSAHPGRPRAVPTQCDVPPNSRFDCAPDKAITQEQCEARGCCYIPAKQGLQGAQMGQPWCFFPPSYPSYKLENLSSSEMGYTATLTRTTPTFFPKDILTLRLDVMMETENRLHFTIKDPANRRYEVPLETPHVHSRAPSPLYSVEFSEEPFGVIVRRQLDGRVLLNTTVAPLFFADQFLQLSTSLPSQYITGLAEHLSPLMLSTSWTRITLWNRDLAPTPGANLYGSHPFYLALEDGGSAHGVFLLNSNAMDVVLQPSPALSWRSTGGILDVYIFLGPEPKSVVQQYLDVVGYPFMPPYWGLGFHLCRWGYSSTAITRQVVENMTRAHFPLDVQWNDLDYMDSRRDFTFNKDGFRDFPAMVQELHQGGRRYMMIVDPAISSSGPAGSYRPYDEGLRRGVFITNETGQPLIGKVWPGSTAFPDFTNPTALAWWEDMVAEFHDQVPFDGMWIDMNEPSNFIRGSEDGCPNNELENPPYVPGVVGGTLQAATICASSHQFLSTHYNLHNLYGLTEAIASHRALVKARGTRPFVISRSTFAGHGRYAGHWTGDVWSSWEQLASSVPEILQFNLLGVPLVGADVCGFLGNTSEELCVRWTQLGAFYPFMRNHNSLLSLPQEPYSFSEPAQQAMRKALTLRYALLPHLYTLFHQAHVAGETVARPLFLEFPKDSSTWTVDHQLLWGEALLITPVLQAGKAEVTGYFPLGTWYDLQTVPVEALGSLPPPPAAPREPAIHSEGQWVTLPAPLDTINVHLRAGYIIPLQGPGLTTTESRQQPMALAVALTKGGEARGELFWDDGESLEVLERGAYTQVIFLARNNTIVNELVRVTSEGAGLQLQKVTVLGVATAPQQVLSNGVPVSNFTYSPDTKVLDICVSLLMGEQFLVSWC

SEQ ID NO: 813 - protein, 1140 aa, synthetic construct
  REGION 1..1140: note = Synthetic
DIQMTQSPSSVSASVGDRVTITCRASQGISSWLAWYQQKPGKAPKLLIYAASSLQSGVPSRFSGSGSGTDFTLTISSLQPEDFATYYCQKADSLPYAFGQGTKLEIKGGGGSGGGGSGGGGSEVQLVESGGGLVQPGGSLRLSCTASGFTFSNYWMTWVRQAPGKGLEWVANIKEDGSEKEYVDSVKGRFTISRDNAKNSLYLQMNSLRGEDTAVYYCARDGEQLVDYYYYYVMDVWGQGTTVTVSSGGGGSGGGGSAHPGRPRAVPTQCDVPPNSRFDCAPDKAITQEQCEARGCCYIPAKQGLQGAQMGQPWCFFPPSYPSYKLENLSSSEMGYTATLTRTTPTFFPKDILTLRLDVMMETENRLHFTIKDPANRRYEVPLETPHVHSRAPSPLYSVEFSEEPFGVIVRRQLDGRVLLNTTVAPLFFADQFLQLSTSLPSQYITGLAEHLSPLMLSTSWTRITLWNRDLAPTPGANLYGSHPFYLALEDGGSAHGVFLLNSNAMDVVLQPSPALSWRSTGGILDVYIFLGPEPKSVVQQYLDVVGYPFMPPYWGLGFHLCRWGYSSTAITRQVVENMTRAHFPLDVQWNDLDYMDSRRDFTFNKDGFRDFPAMVQELHQGGRRYMMIVDPAISSSGPAGSYRPYDEGLRRGVFITNETGQPLIGKVWPGSTAFPDFTNPTALAWWEDMVAEFHDQVPFDGMWIDMNEPSNFIRGSEDGCPNNELENPPYVPGVVGGTLQAATICASSHQFLSTHYNLHNLYGLTEAIASHRALVKARGTRPFVISRSTFAGHGRYAGHWTGDVWSSWEQLASSVPEILQFNLLGVPLVGADVCGFLGNTSEELCVRWTQLGAFYPFMRNHNSLLSLPQEPYSFSEPAQQAMRKALTLRYALLPHLYTLFHQAHVAGETVARPLFLEFPKDSSTWTVDHQLLWGEALLITPVLQAGKAEVTGYFPLGTWYDLQTVPVEALGSLPPPPAAPREPAIHSEGQWVTLPAPLDTINVHLRAGYIIPLQGPGLTTTESRQQPMALAVALTKGGEARGELFWDDGESLEVLERGAYTQVIFLARNNTIVNELVRVTSEGAGLQLQKVTVLGVATAPQQVLSNGVPVSNFTYSPDTKVLDICVSLLMGEQFLVSWC

SEQ ID NO: 814 - protein, 1142 aa, synthetic construct
  REGION 1..1142: note = Synthetic
DIQMTQSPSSLSASVGDRVTITCRASQSISSYLNWYQQKPGKAPKVLIYAASSLQSGVPSRFSGSGSGTDFTLTISSLQPEDFATYYCQQSYSIPLTFGGGTKVEIKGGGGSGGGGSGGGGSEVQLVESGGGLVQPGRSLRLSCAASGFTFDDYAMHWVRQAPGKGLEWVSGISWNSGYIGYADSVKGRFTISRDNAENSLHLQMNSLRAEDTALYYCARGGSTLVRGVKGGYYGMDVWGQGTTVTVSSGGGGSGGGGSAHPGRPRAVPTQCDVPPNSRFDCAPDKAITQEQCEARGCCYIPAKQGLQGAQMGQPWCFFPPSYPSYKLENLSSSEMGYTATLTRTTPTFFPKDILTLRLDVMMETENRLHFTIKDPANRRYEVPLETPHVHSRAPSPLYSVEFSEEPFGVIVRRQLDGRVLLNTTVAPLFFADQFLQLSTSLPSQYITGLAEHLSPLMLSTSWTRITLWNRDLAPTPGANLYGSHPFYLALEDGGSAHGVFLLNSNAMDVVLQPSPALSWRSTGGILDVYIFLGPEPKSVVQQYLDVVGYPFMPPYWGLGFHLCRWGYSSTAITRQVVENMTRAHFPLDVQWNDLDYMDSRRDFTFNKDGFRDFPAMVQELHQGGRRYMMIVDPAISSSGPAGSYRPYDEGLRRGVFITNETGQPLIGKVWPGSTAFPDFTNPTALAWWEDMVAEFHDQVPFDGMWIDMNEPSNFIRGSEDGCPNNELENPPYVPGVVGGTLQAATICASSHQFLSTHYNLHNLYGLTEAIASHRALVKARGTRPFVISRSTFAGHGRYAGHWTGDVWSSWEQLASSVPEILQFNLLGVPLVGADVCGFLGNTSEELCVRWTQLGAFYPFMRNHNSLLSLPQEPYSFSEPAQQAMRKALTLRYALLPHLYTLFHQAHVAGETVARPLFLEFPKDSSTWTVDHQLLWGEALLITPVLQAGKAEVTGYFPLGTWYDLQTVPVEALGSLPPPPAAPREPAIHSEGQWVTLPAPLDTINVHLRAGYIIPLQGPGLTTTESRQQPMALAVALTKGGEARGELFWDDGESLEVLERGAYTQVIFLARNNTIVNELVRVTSEGAGLQLQKVTVLGVATAPQQVLSNGVPVSNFTYSPDTKVLDICVSLLMGEQFLVSWC

SEQ ID NO: 815 - protein, 1131 aa, synthetic construct
  REGION 1..1131: note = Synthetic
EIVMTQSPATLSVSPGERATLSCRASQSVSSNFAWYQQKPGQAPRLLIYSASSRATGIPVRFSGSGSGTEFTLTISSLQSEDFAVYYCQQYNIWPRTFGQGTKVEIKGGGGSGGGGSGGGGSEVQLVESGGGLVQPGGSLRLSCAVSGFIFSSYEMNWVRQAPGKGLEWVSYISSSGSTIFYADSVKGRFTISRDNAKNSLYLQMNSLRAEDTAVYYCVSGVVLFDVWGQGTMVTVSSGGGGSGGGGSAHPGRPRAVPTQCDVPPNSRFDCAPDKAITQEQCEARGCCYIPAKQGLQGAQMGQPWCFFPPSYPSYKLENLSSSEMGYTATLTRTTPTFFPKDILTLRLDVMMETENRLHFTIKDPANRRYEVPLETPHVHSRAPSPLYSVEFSEEPFGVIVRRQLDGRVLLNTTVAPLFFADQFLQLSTSLPSQYITGLAEHLSPLMLSTSWTRITLWNRDLAPTPGANLYGSHPFYLALEDGGSAHGVFLLNSNAMDVVLQPSPALSWRSTGGILDVYIFLGPEPKSVVQQYLDVVGYPFMPPYWGLGFHLCRWGYSSTAITRQVVENMTRAHFPLDVQWNDLDYMDSRRDFTFNKDGFRDFPAMVQELHQGGRRYMMIVDPAISSSGPAGSYRPYDEGLRRGVFITNETGQPLIGKVWPGSTAFPDFTNPTALAWWEDMVAEFHDQVPFDGMWIDMNEPSNFIRGSEDGCPNNELENPPYVPGVVGGTLQAATICASSHQFLSTHYNLHNLYGLTEAIASHRALVKARGTRPFVISRSTFAGHGRYAGHWTGDVWSSWEQLASSVPEILQFNLLGVPLVGADVCGFLGNTSEELCVRWTQLGAFYPFMRNHNSLLSLPQEPYSFSEPAQQAMRKALTLRYALLPHLYTLFHQAHVAGETVARPLFLEFPKDSSTWTVDHQLLWGEALLITPVLQAGKAEVTGYFPLGTWYDLQTVPVEALGSLPPPPAAPREPAIHSEGQWVTLPAPLDTINVHLRAGYIIPLQGPGLTTTESRQQPMALAVALTKGGEARGELFWDDGESLEVLERGAYTQVIFLARNNTIVNELVRVTSEGAGLQLQKVTVLGVATAPQQVLSNGVPVSNFTYSPDTKVLDICVSLLMGEQFLVSWC

SEQ ID NO: 816 - protein, 1140 aa, synthetic construct
  REGION 1..1140: note = Synthetic
DIQMTQSPSSVSASVGDRVTITCRASQGISSWLAWYQQKPGKAPKLLIYAASSLQSGVPSRFSGSGSGTDFTLTISSLQPEDFATYYCQKANSFPYTFGQGTKLEIKGGGGSGGGGSGGGGSEVQLVESGGGLVQPGGSLRLSCAASGFTFSNYWMTWVRQAPGKGLEWVANIKEDGSEKDYVDSVKGRFTISRDNAKNSLYLQMNSLRGEDTAVYYCARDGEQLVDYYYYYVMDVWGQGTTVTVSSGGGGSGGGGSAHPGRPRAVPTQCDVPPNSRFDCAPDKAITQEQCEARGCCYIPAKQGLQGAQMGQPWCFFPPSYPSYKLENLSSSEMGYTATLTRTTPTFFPKDILTLRLDVMMETENRLHFTIKDPANRRYEVPLETPHVHSRAPSPLYSVEFSEEPFGVIVRRQLDGRVLLNTTVAPLFFADQFLQLSTSLPSQYITGLAEHLSPLMLSTSWTRITLWNRDLAPTPGANLYGSHPFYLALEDGGSAHGVFLLNSNAMDVVLQPSPALSWRSTGGILDVYIFLGPEPKSVVQQYLDVVGYPFMPPYWGLGFHLCRWGYSSTAITRQVVENMTRAHFPLDVQWNDLDYMDSRRDFTFNKDGFRDFPAMVQELHQGGRRYMMIVDPAISSSGPAGSYRPYDEGLRRGVFITNETGQPLIGKVWPGSTAFPDFTNPTALAWWEDMVAEFHDQVPFDGMWIDMNEPSNFIRGSEDGCPNNELENPPYVPGVVGGTLQAATICASSHQFLSTHYNLHNLYGLTEAIASHRALVKARGTRPFVISRSTFAGHGRYAGHWTGDVWSSWEQLASSVPEILQFNLLGVPLVGADVCGFLGNTSEELCVRWTQLGAFYPFMRNHNSLLSLPQEPYSFSEPAQQAMRKALTLRYALLPHLYTLFHQAHVAGETVARPLFLEFPKDSSTWTVDHQLLWGEALLITPVLQAGKAEVTGYFPLGTWYDLQTVPVEALGSLPPPPAAPREPAIHSEGQWVTLPAPLDTINVHLRAGYIIPLQGPGLTTTESRQQPMALAVALTKGGEARGELFWDDGESLEVLERGAYTQVIFLARNNTIVNELVRVTSEGAGLQLQKVTVLGVATAPQQVLSNGVPVSNFTYSPDTKVLDICVSLLMGEQFLVSWC

SEQ ID NO: 817 - protein, 1135 aa, synthetic construct
  REGION 1..1135: note = Synthetic
DIQLTQSPSSLSASVGDRVTITCWASQGISSYLAWYQQKPGKAPKLLIYAASTLQSGVPSRFSGSGSGTEFTLTISSLQPEDFATYYCQQLNSYPLTFGGGTKVEIKGGGGSGGGGSGGGGSQVQLVESGGGVVQPGRSLRLSCIASGFTFSVYGIHWVRQAPGKGLEWMAVISHDGNIKHYADSVKGRFTISRDNSKNTLYLQINSLRTEDTAVYYCAKDTWNSLDTFDIWGQGTMVTVSSGGGGSGGGGSAHPGRPRAVPTQCDVPPNSRFDCAPDKAITQEQCEARGCCYIPAKQGLQGAQMGQPWCFFPPSYPSYKLENLSSSEMGYTATLTRTTPTFFPKDILTLRLDVMMETENRLHFTIKDPANRRYEVPLETPHVHSRAPSPLYSVEFSEEPFGVIVRRQLDGRVLLNTTVAPLFFADQFLQLSTSLPSQYITGLAEHLSPLMLSTSWTRITLWNRDLAPTPGANLYGSHPFYLALEDGGSAHGVFLLNSNAMDVVLQPSPALSWRSTGGILDVYIFLGPEPKSVVQQYLDVVGYPFMPPYWGLGFHLCRWGYSSTAITRQVVENMTRAHFPLDVQWNDLDYMDSRRDFTFNKDGFRDFPAMVQELHQGGRRYMMIVDPAISSSGPAGSYRPYDEGLRRGVFITNETGQPLIGKVWPGSTAFPDFTNPTALAWWEDMVAEFHDQVPFDGMWIDMNEPSNFIRGSEDGCPNNELENPPYVPGVVGGTLQAATICASSHQFLSTHYNLHNLYGLTEAIASHRALVKARGTRPFVISRSTFAGHGRYAGHWTGDVWSSWEQLASSVPEILQFNLLGVPLVGADVCGFLGNTSEELCVRWTQLGAFYPFMRNHNSLLSLPQEPYSFSEPAQQAMRKALTLRYALLPHLYTLFHQAHVAGETVARPLFLEFPKDSSTWTVDHQLLWGEALLITPVLQAGKAEVTGYFPLGTWYDLQTVPVEALGSLPPPPAAPREPAIHSEGQWVTLPAPLDTINVHLRAGYIIPLQGPGLTTTESRQQPMALAVALTKGGEARGELFWDDGESLEVLERGAYTQVIFLARNNTIVNELVRVTSEGAGLQLQKVTVLGVATAPQQVLSNGVPVSNFTYSPDTKVLDICVSLLMGEQFLVSWC

SEQ ID NO: 818 - protein, 1135 aa, synthetic construct
  REGION 1..1135: note = Synthetic
AIQMTQSPSSLSASVGDRVTITCRASQGIRNDLGWYQQKPGKAPKLLIYAASTLQSGVPSRFSGSGSGTDFTLTISSLQPEDFATYYCLQDYNYPFTFGPGTKVDIKGGGGSGGGGSGGGGSQVTLRESGPALVKPSQTLTLTCTFSGFSLNTYGMFVSWIRQPPGKALEWLAHIHWDDDKYYSTSLKTRLTISKDTSKNQVVLTMTNMDPVDTATYYCARGHNNLNYIIHWGQGTLVTVSSGGGGSGGGGSAHPGRPRAVPTQCDVPPNSRFDCAPDKAITQEQCEARGCCYIPAKQGLQGAQMGQPWCFFPPSYPSYKLENLSSSEMGYTATLTRTTPTFFPKDILTLRLDVMMETENRLHFTIKDPANRRYEVPLETPHVHSRAPSPLYSVEFSEEPFGVIVRRQLDGRVLLNTTVAPLFFADQFLQLSTSLPSQYITGLAEHLSPLMLSTSWTRITLWNRDLAPTPGANLYGSHPFYLALEDGGSAHGVFLLNSNAMDVVLQPSPALSWRSTGGILDVYIFLGPEPKSVVQQYLDVVGYPFMPPYWGLGFHLCRWGYSSTAITRQVVENMTRAHFPLDVQWNDLDYMDSRRDFTFNKDGFRDFPAMVQELHQGGRRYMMIVDPAISSSGPAGSYRPYDEGLRRGVFITNETGQPLIGKVWPGSTAFPDFTNPTALAWWEDMVAEFHDQVPFDGMWIDMNEPSNFIRGSEDGCPNNELENPPYVPGVVGGTLQAATICASSHQFLSTHYNLHNLYGLTEAIASHRALVKARGTRPFVISRSTFAGHGRYAGHWTGDVWSSWEQLASSVPEILQFNLLGVPLVGADVCGFLGNTSEELCVRWTQLGAFYPFMRNHNSLLSLPQEPYSFSEPAQQAMRKALTLRYALLPHLYTLFHQAHVAGETVARPLFLEFPKDSSTWTVDHQLLWGEALLITPVLQAGKAEVTGYFPLGTWYDLQTVPVEALGSLPPPPAAPREPAIHSEGQWVTLPAPLDTINVHLRAGYIIPLQGPGLTTTESRQQPMALAVALTKGGEARGELFWDDGESLEVLERGAYTQVIFLARNNTIVNELVRVTSEGAGLQLQKVTVLGVATAPQQVLSNGVPVSNFTYSPDTKVLDICVSLLMGEQFLVSWC

SEQ ID NO: 819 - protein, 1138 aa, synthetic construct
  REGION 1..1138: note = Synthetic
EIVLTQSPATLSLSPGERATLSCRASQSVSSYLAWYQQKPGQAPRLLIHDVSNRATGIPARFSGSGSGTDFTLTISSLEPEDFVVYYCQQRSDWPITFGQGTRLEIKGGGGSGGGGSGGGGSEVQLVESGGGLVQPGRSLRLSCAASGFTFDDKAMHWVRQVPGKGLEWISGISWNSGTIGYADSVKGRFIISRDNAKNSLYLQMNSLRAEDTALYYCAKDGDTSGWYWYGLDVWGQGTTVTVSSGGGGSGGGGSAHPGRPRAVPTQCDVPPNSRFDCAPDKAITQEQCEARGCCYIPAKQGLQGAQMGQPWCFFPPSYPSYKLENLSSSEMGYTATLTRTTPTFFPKDILTLRLDVMMETENRLHFTIKDPANRRYEVPLETPHVHSRAPSPLYSVEFSEEPFGVIVRRQLDGRVLLNTTVAPLFFADQFLQLSTSLPSQYITGLAEHLSPLMLSTSWTRITLWNRDLAPTPGANLYGSHPFYLALEDGGSAHGVFLLNSNAMDVVLQPSPALSWRSTGGILDVYIFLGPEPKSVVQQYLDVVGYPFMPPYWGLGFHLCRWGYSSTAITRQVVENMTRAHFPLDVQWNDLDYMDSRRDFTFNKDGFRDFPAMVQELHQGGRRYMMIVDPAISSSGPAGSYRPYDEGLRRGVFITNETGQPLIGKVWPGSTAFPDFTNPTALAWWEDMVAEFHDQVPFDGMWIDMNEPSNFIRGSEDGCPNNELENPPYVPGVVGGTLQAATICASSHQFLSTHYNLHNLYGLTEAIASHRALVKARGTRPFVISRSTFAGHGRYAGHWTGDVWSSWEQLASSVPEILQFNLLGVPLVGADVCGFLGNTSEELCVRWTQLGAFYPFMRNHNSLLSLPQEPYSFSEPAQQAMRKALTLRYALLPHLYTLFHQAHVAGETVARPLFLEFPKDSSTWTVDHQLLWGEALLITPVLQAGKAEVTGYFPLGTWYDLQTVPVEALGSLPPPPAAPREPAIHSEGQWVTLPAPLDTINVHLRAGYIIPLQGPGLTTTESRQQPMALAVALTKGGEARGELFWDDGESLEVLERGAYTQVIFLARNNTIVNELVRVTSEGAGLQLQKVTVLGVATAPQQVLSNGVPVSNFTYSPDTKVLDICVSLLMGEQFLVSWC

SEQ ID NO: 820 - protein, 1137 aa, synthetic construct
  REGION 1..1137: note = Synthetic
DIQMTQSPSSLSASVGDRVTITCRASQSIRNVLGWFQQKPGKAPQRLIYAASSLQSGVPSRFSGSGSGTEFTLTISSLQPEDFATYYCLQHNFYPLTFGGGTKVEIKGGGGSGGGGSGGGGSQVQLVESGGGVVQPGRSLRLSCAASGFTFTTYGMHWVRQAPGKGLEWVAVIWYDGSNKYYGDSVKGRFTISRDNSKNTLYLQMNSLRVDDTAVYYCTRTHGYTRSSDGFDYWGQGTLVTVSSGGGGSGGGGSAHPGRPRAVPTQCDVPPNSRFDCAPDKAITQEQCEARGCCYIPAKQGLQGAQMGQPWCFFPPSYPSYKLENLSSSEMGYTATLTRTTPTFFPKDILTLRLDVMMETENRLHFTIKDPANRRYEVPLETPHVHSRAPSPLYSVEFSEEPFGVIVRRQLDGRVLLNTTVAPLFFADQFLQLSTSLPSQYITGLAEHLSPLMLSTSWTRITLWNRDLAPTPGANLYGSHPFYLALEDGGSAHGVFLLNSNAMDVVLQPSPALSWRSTGGILDVYIFLGPEPKSVVQQYLDVVGYPFMPPYWGLGFHLCRWGYSSTAITRQVVENMTRAHFPLDVQWNDLDYMDSRRDFTFNKDGFRDFPAMVQELHQGGRRYMMIVDPAISSSGPAGSYRPYDEGLRRGVFITNETGQPLIGKVWPGSTAFPDFTNPTALAWWEDMVAEFHDQVPFDGMWIDMNEPSNFIRGSEDGCPNNELENPPYVPGVVGGTLQAATICASSHQFLSTHYNLHNLYGLTEAIASHRALVKARGTRPFVISRSTFAGHGRYAGHWTGDVWSSWEQLASSVPEILQFNLLGVPLVGADVCGFLGNTSEELCVRWTQLGAFYPFMRNHNSLLSLPQEPYSFSEPAQQAMRKALTLRYALLPHLYTLFHQAHVAGETVARPLFLEFPKDSSTWTVDHQLLWGEALLITPVLQAGKAEVTGYFPLGTWYDLQTVPVEALGSLPPPPAAPREPAIHSEGQWVTLPAPLDTINVHLRAGYIIPLQGPGLTTTESRQQPMALAVALTKGGEARGELFWDDGESLEVLERGAYTQVIFLARNNTIVNELVRVTSEGAGLQLQKVTVLGVATAPQQVLSNGVPVSNFTYSPDTKVLDICVSLLMGEQFLVSWC

SEQ ID NO: 821 - protein, 1168 aa, synthetic construct
  REGION 1..1168: note = Synthetic
MHRPRRRGTRPPPLALLAALLLAARGADADIQMTQSPSSVSASVGDRVTITCRASQGIASWLAWYQQKPGKAPELLIYAASSLQGGVPSRFSGSGSGTDFTLTISSLQPEDFAIYYCQQANYFPWTFGQGTKVEIKGGGGSGGGGSGGGGSQITLKESGPTLVKPTQTLTLTCTFSGFSLSTSGVGVVWIRQPPGKALEWLALIYWNDHKRYSPSLGSRLTITKDTSKNQVVLTMTNMDPVDTATYYCAHYSGSYSYYYYGLDVWGQGTTVTVSSGGGGSGGGGSAHPGRPRAVPTQCDVPPNSRFDCAPDKAITQEQCEARGCCYIPAKQGLQGAQMGQPWCFFPPSYPSYKLENLSSSEMGYTATLTRTTPTFFPKDILTLRLDVMMETENRLHFTIKDPANRRYEVPLETPHVHSRAPSPLYSVEFSEEPFGVIVRRQLDGRVLLNTTVAPLFFADQFLQLSTSLPSQYITGLAEHLSPLMLSTSWTRITLWNRDLAPTPGANLYGSHPFYLALEDGGSAHGVFLLNSNAMDVVLQPSPALSWRSTGGILDVYIFLGPEPKSVVQQYLDVVGYPFMPPYWGLGFHLCRWGYSSTAITRQVVENMTRAHFPLDVQWNDLDYMDSRRDFTFNKDGFRDFPAMVQELHQGGRRYMMIVDPAISSSGPAGSYRPYDEGLRRGVFITNETGQPLIGKVWPGSTAFPDFTNPTALAWWEDMVAEFHDQVPFDGMWIDMNEPSNFIRGSEDGCPNNELENPPYVPGVVGGTLQAATICASSHQFLSTHYNLHNLYGLTEAIASHRALVKARGTRPFVISRSTFAGHGRYAGHWTGDVWSSWEQLASSVPEILQFNLLGVPLVGADVCGFLGNTSEELCVRWTQLGAFYPFMRNHNSLLSLPQEPYSFSEPAQQAMRKALTLRYALLPHLYTLFHQAHVAGETVARPLFLEFPKDSSTWTVDHQLLWGEALLITPVLQAGKAEVTGYFPLGTWYDLQTVPVEALGSLPPPPAAPREPAIHSEGQWVTLPAPLDTINVHLRAGYIIPLQGPGLTTTESRQQPMALAVALTKGGEARGELFWDDGESLEVLERGAYTQVIFLARNNTIVNELVRVTSEGAGLQLQKVTVLGVATAPQQVLSNGVPVSNFTYSPDTKVLDICVSLLMGEQFLVSWC

SEQ ID NO: 822 - protein, 1171 aa, synthetic construct
  REGION 1..1171: note = Synthetic
MHRPRRRGTRPPPLALLAALLLAARGADADIQMTQSPSSLSASVGDRVTITCRASQSISSYLNWYQQKPGKAPKLLIYAASSLQSGVPSRFSGSGSGTDFTLTISSLQPEDFATYYCQQSYSTPPITFGQGTRLEIKGGGGSGGGGSGGGGSQVQLVESGGGVVQPGRSLRLSCAASGFPFSNYVMYWVRQAPGKGLEWVALIFFDGKKNYHADSVKGRFTITRDNSKNMLYLQMNSLRPEDAAVYYCAKIHCPNGVCYKGYYGMDVWGQGTTVTVSSGGGGSGGGGSAHPGRPRAVPTQCDVPPNSRFDCAPDKAITQEQCEARGCCYIPAKQGLQGAQMGQPWCFFPPSYPSYKLENLSSSEMGYTATLTRTTPTFFPKDILTLRLDVMMETENRLHFTIKDPANRRYEVPLETPHVHSRAPSPLYSVEFSEEPFGVIVRRQLDGRVLLNTTVAPLFFADQFLQLSTSLPSQYITGLAEHLSPLMLSTSWTRITLWNRDLAPTPGANLYGSHPFYLALEDGGSAHGVFLLNSNAMDVVLQPSPALSWRSTGGILDVYIFLGPEPKSVVQQYLDVVGYPFMPPYWGLGFHLCRWGYSSTAITRQVVENMTRAHFPLDVQWNDLDYMDSRRDFTFNKDGFRDFPAMVQELHQGGRRYMMIVDPAISSSGPAGSYRPYDEGLRRGVFITNETGQPLIGKVWPGSTAFPDFTNPTALAWWEDMVAEFHDQVPFDGMWIDMNEPSNFIRGSEDGCPNNELENPPYVPGVVGGTLQAATICASSHQFLSTHYNLHNLYGLTEAIASHRALVKARGTRPFVISRSTFAGHGRYAGHWTGDVWSSWEQLASSVPEILQFNLLGVPLVGADVCGFLGNTSEELCVRWTQLGAFYPFMRNHNSLLSLPQEPYSFSEPAQQAMRKALTLRYALLPHLYTLFHQAHVAGETVARPLFLEFPKDSSTWTVDHQLLWGEALLITPVLQAGKAEVTGYFPLGTWYDLQTVPVEALGSLPPPPAAPREPAIHSEGQWVTLPAPLDTINVHLRAGYIIPLQGPGLTTTESRQQPMALAVALTKGGEARGELFWDDGESLEVLERGAYTQVIFLARNNTIVNELVRVTSEGAGLQLQKVTVLGVATAPQQVLSNGVPVSNFTYSPDTKVLDICVSLLMGEQFLVSWC

SEQ ID NO: 823 - protein, 1164 aa, synthetic construct
  REGION 1..1164: note = Synthetic
MHRPRRRGTRPPPLALLAALLLAARGADADIQMTQSPSSLSASVGDRVTITCRASQSISSYLNWYQQKPGKAPKLLIYAASSLQSGVPSRFSGSGSGTDFTLTISSLQPEDFATYYCQQSYSTPPITFGQGTRLEIKGGGGSGGGGSGGGGSEVQLVESGGGLVQPGGSLRLSCAASGFTFNIFEMNWVRQAPGKGLEWISYISSRGTTTYYADSVRGRFTISRDNAKNSLYLQMNSLRAEDTAVYYCARDYEATIPFDFWGQGTLVTVSSGGGGSGGGGSAHPGRPRAVPTQCDVPPNSRFDCAPDKAITQEQCEARGCCYIPAKQGLQGAQMGQPWCFFPPSYPSYKLENLSSSEMGYTATLTRTTPTFFPKDILTLRLDVMMETENRLHFTIKDPANRRYEVPLETPHVHSRAPSPLYSVEFSEEPFGVIVRRQLDGRVLLNTTVAPLFFADQFLQLSTSLPSQYITGLAEHLSPLMLSTSWTRITLWNRDLAPTPGANLYGSHPFYLALEDGGSAHGVFLLNSNAMDVVLQPSPALSWRSTGGILDVYIFLGPEPKSVVQQYLDVVGYPFMPPYWGLGFHLCRWGYSSTAITRQVVENMTRAHFPLDVQWNDLDYMDSRRDFTFNKDGFRDFPAMVQELHQGGRRYMMIVDPAISSSGPAGSYRPYDEGLRRGVFITNETGQPLIGKVWPGSTAFPDFTNPTALAWWEDMVAEFHDQVPFDGMWIDMNEPSNFIRGSEDGCPNNELENPPYVPGVVGGTLQAATICASSHQFLSTHYNLHNLYGLTEAIASHRALVKARGTRPFVISRSTFAGHGRYAGHWTGDVWSSWEQLASSVPEILQFNLLGVPLVGADVCGFLGNTSEELCVRWTQLGAFYPFMRNHNSLLSLPQEPYSFSEPAQQAMRKALTLRYALLPHLYTLFHQAHVAGETVARPLFLEFPKDSSTWTVDHQLLWGEALLITPVLQAGKAEVTGYFPLGTWYDLQTVPVEALGSLPPPPAAPREPAIHSEGQWVTLPAPLDTINVHLRAGYIIPLQGPGLTTTESRQQPMALAVALTKGGEARGELFWDDGESLEVLERGAYTQVIFLARNNTIVNELVRVTSEGAGLQLQKVTVLGVATAPQQVLSNGVPVSNFTYSPDTKVLDICVSLLMGEQFLVSWC

SEQ ID NO: 824 - protein, 1166 aa, synthetic construct
  REGION 1..1166: note = Synthetic
MHRPRRRGTRPPPLALLAALLLAARGADADIQMTQSPSSLSASVGDRVTITCRASQSISSYLNWYQQKPGKAPKLLIYAASSLQSGVPSRFSGSGSGTDFTLTISSLQPEDFATYYCQQSYSTPPITFGQGTRLEIKGGGGSGGGGSGGGGSEVQLVESGGGLVQPGRSLRLSCAASGFTFDDYAMNWVRQAPGKGLEWVSGISWSSGSMDYADSVKGRFTISRDNAKNSLYLQMNSLRTEDTALYYCAKAREVGDYYGMDVWGQGTTVTVSSGGGGSGGGGSAHPGRPRAVPTQCDVPPNSRFDCAPDKAITQEQCEARGCCYIPAKQGLQGAQMGQPWCFFPPSYPSYKLENLSSSEMGYTATLTRTTPTFFPKDILTLRLDVMMETENRLHFTIKDPANRRYEVPLETPHVHSRAPSPLYSVEFSEEPFGVIVRRQLDGRVLLNTTVAPLFFADQFLQLSTSLPSQYITGLAEHLSPLMLSTSWTRITLWNRDLAPTPGANLYGSHPFYLALEDGGSAHGVFLLNSNAMDVVLQPSPALSWRSTGGILDVYIFLGPEPKSVVQQYLDVVGYPFMPPYWGLGFHLCRWGYSSTAITRQVVENMTRAHFPLDVQWNDLDYMDSRRDFTFNKDGFRDFPAMVQELHQGGRRYMMIVDPAISSSGPAGSYRPYDEGLRRGVFITNETGQPLIGKVWPGSTAFPDFTNPTALAWWEDMVAEFHDQVPFDGMWIDMNEPSNFIRGSEDGCPNNELENPPYVPGVVGGTLQAATICASSHQFLSTHYNLHNLYGLTEAIASHRALVKARGTRPFVISRSTFAGHGRYAGHWTGDVWSSWEQLASSVPEILQFNLLGVPLVGADVCGFLGNTSEELCVRWTQLGAFYPFMRNHNSLLSLPQEPYSFSEPAQQAMRKALTLRYALLPHLYTLFHQAHVAGETVARPLFLEFPKDSSTWTVDHQLLWGEALLITPVLQAGKAEVTGYFPLGTWYDLQTVPVEALGSLPPPPAAPREPAIHSEGQWVTLPAPLDTINVHLRAGYIIPLQGPGLTTTESRQQPMALAVALTKGGEARGELFWDDGESLEVLERGAYTQVIFLARNNTIVNELVRVTSEGAGLQLQKVTVLGVATAPQQVLSNGVPVSNFTYSPDTKVLDICVSLLMGEQFLVSWC

SEQ ID NO: 825 - DNA, 141 bp, synthetic construct
  misc_feature 1..141: note = Synthetic
  source 1..141: mol_type = other DNA
aggaacccctagtgatggagttggccactccctctctgcgcgctcgctcgctcactgaggccgggcgaccaaaggtcgcccgacgcccgggctttgcccgggcggcctcagtgagcgagcgagcgcgcagctgcctgcagg

SEQ ID NO: 826 - DNA, 130 bp, synthetic construct
  misc_feature 1..130: note = Synthetic
  source 1..130: mol_type = other DNA
aggaacccctagtgatggagttggccactccctctctgcgcgctcgctcgctcactgaggccgggcgaccaaaggtcgcccgacgcccgggctttgcccgggcggcctcagtgagcgagcgagcgcgcag

SEQ ID NO: 827 - DNA, 227 bp, synthetic construct
  misc_feature 1..227: note = Synthetic
  source 1..227: mol_type = other DNA
tcagccataccacatttgtagaggttttacttgctttaaaaaacctcccacacctccccctgaacctgaaacataaaatgaatgcaattgttgttgttaacttgtttattgcagcttataatggttacaaataaagcaatagcatcacaaatttcacaaataaagcatttttttcactgcattctagttgtggtttgtccaaactcatcaatgtatcttatcatgtc

SEQ ID NO: 828 - protein, 15 aa, synthetic construct
  REGION 1..15: note = Synthetic
GGGGSGGGGSGGGGS

SEQ ID NO: 829 - protein, 10 aa, synthetic construct
  REGION 1..10: note = Synthetic
GGGGSGGGGS

SEQ ID NO: 830 - DNA, 45 bp, synthetic construct
  misc_feature 1..45: note = Synthetic
  source 1..45: mol_type = other DNA
ggcggcggcggaagcggagggggaggatcaggaggaggcggatcc

SEQ ID NO: 831 - DNA, 45 bp, synthetic construct
  misc_feature 1..45: note = Synthetic
  source 1..45: mol_type = other DNA
ggtggtggtggaagtggtggtggtggcagtggtggtggtggatct

SEQ ID NO: 832 - DNA, 45 bp, synthetic construct
  misc_feature 1..45: note = Synthetic
  source 1..45: mol_type = other DNA
ggaggaggaggctctggaggaggaggctctggagggggaggctct

SEQ ID NO: 833 - DNA, 45 bp, synthetic construct
  misc_feature 1..45: note = Synthetic
  source 1..45: mol_type = other DNA
gggggtgggggctctggggggggaggcagtggaggaggtggctct

SEQ ID NO: 834 - DNA, 45 bp, synthetic construct
  misc_feature 1..45: note = Synthetic
  source 1..45: mol_type = other DNA
ggaggtgggggctcaggaggaggtggctctggaggaggaggctca

SEQ ID NO: 835 - DNA, 30 bp, synthetic construct
  misc_feature 1..30: note = Synthetic
  source 1..30: mol_type = other DNA
ggaggtggtggaagtggaggtggtggaagt

SEQ ID NO: 836 - DNA, 30 bp, synthetic construct
  misc_feature 1..30: note = Synthetic
  source 1..30: mol_type = other DNA
ggtggtggtggtagtggtggtggtggctct

SEQ ID NO: 837 - DNA, 30 bp, synthetic construct
  misc_feature 1..30: note = Synthetic
  source 1..30: mol_type = other DNA
ggtgggggtggctctgggggtggaggcagt

SEQ ID NO: 838 - DNA, 30 bp, synthetic construct
  misc_feature 1..30: note = Synthetic
  source 1..30: mol_type = other DNA
ggaggtggaggctctggaggaggtggcagt

SEQ ID NO: 839 - DNA, 30 bp, synthetic construct
  misc_feature 1..30: note = Synthetic
  source 1..30: mol_type = other DNA
ggtggtggtggcagtggtggtggtggttct

SEQ ID NO: 840 - DNA, 30 bp, synthetic construct
  misc_feature 1..30: note = Synthetic
  source 1..30: mol_type = other DNA
ggtggaggtggctcagggggaggaggcagt

SEQ ID NO: 841 - DNA, 30 bp, synthetic construct
  misc_feature 1..30: note = Synthetic
  source 1..30: mol_type = other DNA
gggggaggaggctcaggtgggggtggcagt

SEQ ID NO: 842 - DNA, 15 bp, synthetic construct
  misc_feature 1..15: note = Synthetic
  source 1..15: mol_type = other DNA
ggtggtggtggctct

SEQ ID NO: 843 - DNA, 4014 bp, synthetic construct
  misc_feature 1..4014: note = Synthetic
  misc_feature 1..130: note = 130 bp AAV2 ITR Left
  misc_feature 139..238: note = mAlb Splice Acceptor
  misc_feature 241..966: note = 12843 Anti-TfR scFv
  misc_feature 967..996: note = Linker
  misc_feature 997..3645: note = Alpha-glucosidase (70-952)
  misc_feature 3652..3878: note = SV40 PolyA
  misc_feature 3885..4014: note = 130 bp AAV2 ITR Right
  source 1..4014: mol_type = other DNA
ctgcgcgctcgctcgctcactgaggccgcccgggcaaagcccgggcgtcgggcgacctttggtcgcccggcctcagtgagcgagcgagcgcgcagagagggagtggccaactccatcactaggggttcctagatctcttaggtcagtgaagagaagaacaaaaagcagcatattacagttagttgtcttcatcaatctttaaatatgttgtgtggtttttctctccctgtttccacagttgacatccagatgacccagtctccatcctccctgtctgcatctgtaggagacagagtcaccatcacttgccgggcaagtcagagcattagcagctatttaaattggtatcagcagaaaccagggaaagcccctaagctcctgatctatgctgcatccagtttgcaaagtggggtcccgtcaaggttcagtggcagtggatctgggacagatttcactctcaccatcagcagtctgcaacctgaagattttgcaacttactactgtcaacagagttacagtacccctccgatcaccttcggccaagggacacgactggagattaaaggcggcggcggaagcggagggggaggatcaggaggaggcggatccgaggtgcagctggtggagtctgggggaggcttagtacagcctggagggtccctaagactctcctgtgcagcctctggattcaccttcaatatttttgaaatgaactgggtccgccaggctccagggaaggggctggagtggatttcctacattagtagtcgtggaactaccacatactacgcagactctgtgaggggccgattcaccatctccagagacaacgccaagaactcactgtatctgcaaatgaacagcctgagagccgaggacacggctgtttattactgtgcgagagattatgaagcaacaatcccttttgacttctggggccagggaaccctggtcaccgtctcctcaggaggtggtggaagtggaggtggtggaagtgcacaccccggccgtcccagagcagtgcccacacagtgcgacgtcccccccaacagccgcttcgattgcgcccctgacaaggccatcacccaggaacagtgcgaggcccgcggctgttgctacatccctgcaaagcaggggctgcagggagcccagatggggcagccctggtgcttcttcccacccagctaccccagctacaagctggagaacctgagctcctctgaaatgggctacacggccaccctgacccgtaccacccccaccttcttccccaaggacatcctgaccctgcggctggacgtgatgatggagactgagaaccgcctccacttcacgatcaaagatccagctaacaggcgctacgaggtgcccttggagaccccgcatgtccacagccgggcaccgtccccactctacagcgtggagttctccgaggagcccttcggggtgatcgtgcgccggcagctggacggccgcgtgctgctgaacacgacggtggcgcccctgttctttgcggaccagttccttcagctgtccacctcgctgccctcgcagtatatcacaggcctcgccgagcacctcagtcccctgatgctcagcaccagctggaccaggatcaccctgtggaaccgggaccttgcgcccacgcccggtgcgaacctctacgggtctcaccctttctacctggcgctggaggacggcgggtcggcacacggggtgttcctgctaaacagcaatgccatggatgtggtcctgcagccgagccctgcccttagctggaggtcgacaggtgggatcctggatgtctacatcttcctgggcccagagcccaagagcgtggtgcagcagtacctggacgttgtgggatacccgttcatgccgccatactggggcctgggcttccacctgtgccgctggggctactcctccaccgctatcacccgccaggtggtggagaacatgaccagggcccacttccccctggacgtccagtggaacgacctggactacatggactcccggagggacttcacgttcaacaaggatggcttccgggacttcccggccatggtgcaggagctgcaccagggcggccggcgctacatgatgatcgtggatcctgccatcagcagctcgggccctgccgggagctacaggccctacgacgagggtctgcggaggggggttttcatcaccaacgagaccggccagccgctgattgggaaggtatggcccgggtccactgccttccccgacttcaccaaccccacagccctggcctggtgggaggacatggtggctgagttccatgaccaggtgcccttcgacggcatgtggattgacatgaacgagccttccaacttcatcaggggctctgaggacggctgccccaacaatgagctggagaacccaccctacgtgcctggggtggttggggggaccctccaggcggccaccatctgtgcctccagccaccagtttctctccacacactacaacctgcacaacctctacggcctgaccgaagccatcgcctcccacagggcgctggtgaaggctcgggggacacgcccatttgtgatctcccgctcgacctttgctggccacggccgatacgccggccactggacgggggacgtgtggagctcctgggagcagctcgcctcctccgtgccagaaatcctgcagtttaacctgctgggggtgcctctggtcggggccgacgtctgcggcttcctgggcaacacctcagaggagctgtgtgtgcgctggacccagctgggggccttctaccccttcatgcggaaccacaacagcctgctcagtctgccccaggagccgtacagcttcagcgagccggcccagcaggccatgaggaaggccctcaccctgcgctacgcactcctcccccacctctacacactgttccaccaggcccacgtcgcgggggagaccgtggcccggcccctcttcctggagttccccaaggactctagcacctggactgtggaccaccagctcctgtggggggaggccctgctcatcaccccagtgctccaggccgggaaggccgaagtgactggctacttccccttgggcacatggtacgacctgcagacggtgccagtagaggcccttggcagcctcccacccccacctgcagctccccgtgagccagccatccacagcgaggggcagtgggtgacgctgccggcccccctggacaccatcaacgtccacctccgggctgggtacatcatccccctgcagggccctggcctcacaaccacagagtcccgccagcagcccatggccctggctgtggccctgaccaagggtggggaggcccgaggggagctgttctgggacgatggagagagcctggaagtgctggagcgaggggcctacacacaggtcatcttcctggccaggaataacacgatcgtgaatgagctggtacgtgtgaccagtgagggagctggcctgcagctgcagaaggtgactgtcctgggcgtggccacggcgccccagcaggtcctctccaacggtgtccctgtctccaacttcacctacagccccgacaccaaggtcctggacatctgtgtctcgctgttgatgggagagcagtttctcgtcagctggtgttaataatcagccataccacatttgtagaggttttacttgctttaaaaaacctcccacacctccccctgaacctgaaacataaaatgaatgcaattgttgttgttaacttgtttattgcagcttataatggttacaaataaagcaatagcatcacaaatttcacaaataaagcatttttttcactgcattctagttgtggtttgtccaaactcatcaatgtatcttatcatgtcagatctaggaacccctagtgatggagttggccactccctctctgcgcgctcgctcgctcactgaggccgggcgaccaaaggtcgcccgacgcccgggctttgcccgggcggcctcagtgagcgagcgagcgcgcag

SEQ ID NO: 844 - DNA, 4014 bp, synthetic construct
  misc_feature 1..4014: note = Synthetic
  misc_feature 1..130: note = 130 bp AAV2 ITR Left
  misc_feature 139..238: note = mAlb Splice Acceptor
  misc_feature 241..966: note = 12843 Anti-TfR scFv
  misc_feature 967..996: note = Linker
  misc_feature 997..3645: note = Alpha-glucosidase (70-952)
  misc_feature 3652..3878: note = SV40 PolyA
  misc_feature 3885..4014: note = 130 bp AAV2 ITR Right
  source 1..4014: mol_type = other DNA
ctgcgcgctcgctcgctcactgaggccgcccgggcaaagcccgggcgtcgggcgacctttggtcgcccggcctcagtgagcgagcgagcgcgcagagagggagtggccaactccatcactaggggttcctagatctcttaggtcagtgaagagaagaacaaaaagcagcatattacagttagttgtcttcatcaatctttaaatatgttgtgtggtttttctctccctgtttccacagttgacatccagatgacacagagcccctctagcctgtctgcctctgtgggagacagagtgaccatcacctgtagagccagccagagcatcagcagctacctgaactggtatcagcagaagcctggcaaggcccctaaactgctgatctatgctgccagcagcctgcagtctggggtgccctctagattttctggcagtggctctggcacagacttcaccctgaccataagctccctgcagcctgaggactttgccacctactactgtcagcagagctacagcacccctcctatcacctttggccagggcaccagactggaaatcaaaggtggtggtggaagtggtggtggtggcagtggtggtggtggatctgaagtgcagctggtggaaagtggtggtggcctggttcagcctggtggctctctgagactgagctgtgcagcctctggcttcaccttcaacatctttgagatgaactgggtcagacaggccccaggcaaaggcctggaatggatcagctacatcagctccagaggcaccacaacctactatgctgactctgtcagaggcaggttcaccatcagcagagacaatgccaagaacagcctgtacctgcagatgaactccctgagagctgaggacacagcagtgtactactgtgccagggactatgaggctacaatcccctttgacttctggggccagggaaccctggtcacagttagcagtggtggtggtggtagtggtggtggtggctctgcccatcctggcagacctagagctgtgcccacacagtgtgatgtgcctccaaacagcagatttgactgtgcccctgacaaggccatcacacaagagcagtgtgaagccagaggctgctgttacatccctgccaagcaaggactgcaaggggctcagatgggacagccctggtgcttcttcccaccatcttaccccagctacaagctggaaaacctgagcagctctgagatgggctacactgctacactgaccagaaccacacctacattcttcccaaaggacatcctgacactgaggctggatgtgatgatggaaacagagaacaggctgcacttcaccatcaaggaccctgccaatagaagatatgaggtgcccctggaaacccctcatgtgcactctagagccccatctccactgtactctgtggaattttctgaggaaccctttggggtcatagtcagaaggcagctggatggcagagtgctgctgaacacaactgtggcccctctgttctttgctgatcagttcctgcagctgagcaccagcctgcctagccagtatatcacaggcctggcagagcacctgtctccactgatgctgagcacatcctggaccagaatcaccctgtggaacagagacctggctcccacacctggggccaacctgtatggctctcaccccttctatctggccctggaagatggtggttcagcccatggtgtctttctgctgaactccaatgccatggatgtggtgctgcagccctctcctgctctgtcttggagaagcactggtggcatcctggatgtgtacatctttctgggccctgagcctaagtctgtggtgcagcagtacctggatgttgtgggctaccccttcatgcctccttattggggcctgggcttccacctgtgcagatggggatacagcagcacagccatcaccagacaggttgtggaaaacatgaccagagcacacttcccactggatgtgcagtggaatgacctggactacatggacagcagaagggacttcaccttcaacaaggatggcttcagagacttccctgccatggtgcaagagctgcaccaaggtggtagaagatatatgatgattgtggacccagccatcagctcctctggaccagctggcagctacagaccctatgatgagggactgagaagaggggtgttcatcaccaatgagacaggccagcctctgattggcaaagtgtggccaggctccacagcctttccagatttcacaaaccccacagctctggcttggtgggaagatatggtggcagagttccatgatcaggtgccctttgatggcatgtggattgacatgaatgagcccagcaacttcatcaggggctctgaggatggatgccccaacaatgaactggaaaatcctccttatgtgcctggtgttgttggagggacactgcaggcagccacaatttgtgccagctctcaccagtttctgagcacccactacaacctgcacaatctgtatggcctgactgaggccattgccagccacagggctcttgtgaaggctagaggcaccagaccttttgtgatcagcaggtccacctttgctggccatggcagatatgctggccactggactggggatgtgtggtctagttgggagcagctggctagctctgtgcctgagatcctgcagttcaacctgctgggagtgccccttgttggagcagatgtgtgtggcttcctgggcaacacctcagaggaactgtgtgtcagatggactcagctgggagcattctaccctttcatgagaaaccacaacagcctgctgagcctgcctcaagagccttacagcttttctgagccagcacagcaggccatgagaaaggccctgactctgagatatgccctgctgcctcacctgtacaccctgttccatcaggctcatgtggctggggagactgtggctagacccctgttcctggaattccccaaggacagctccacctggacagtggatcatcagctgctgtggggagaagccctgctgattacacctgtgctgcaggctggcaaggctgaagtgacaggctacttccctcttggcacttggtatgacctgcagacagtgcctgtggaagctctgggatctctgcctccacctcctgctgctcctagagagcctgccattcactctgaaggccagtgggttaccctgcctgctccactggataccatcaatgtgcatctgagagcaggctacatcatccctctgcaaggccctggcctgaccaccacagaatctagacagcagccaatggcactggctgtggccctgaccaaaggtggagaagctagaggggagctgttctgggatgatggggagagcctggaagtgctggaaagaggggcctatacacaagtgatttttctggctaggaacaataccattgtgaatgagcttgtcagagtcacctctgaaggtgctggcctgcagctccagaaagtgacagtgcttggagtggccacagcaccccagcaagtgctgtctaatggggtgccagtgtccaacttcacatacagccctgataccaaggtcctggacatctgtgtgtccctgcttatgggagagcagttcctggtgtcttggtgctaataatcagccataccacatttgtagaggttttacttgctttaaaaaacctcccacacctccccctgaacctgaaacataaaatgaatgcaattgttgttgttaacttgtttattgcagcttataatggttacaaataaagcaatagcatcacaaatttcacaaataaagcatttttttcactgcattctagttgtggtttgtccaaactcatcaatgtatcttatcatgtcagatctaggaacccctagtgatggagttggccactccctctctgcgcgctcgctcgctcactgaggccgggcgaccaaaggtcgcccgacgcccgggctttgcccgggcggcctcagtgagcgagcgagcgcgcag

SEQ ID NO: 845 - DNA, 4014 bp, synthetic construct
  misc_feature 1..4014: note = Synthetic
  misc_feature 1..130: note = 130 bp AAV2 ITR Left
  misc_feature 139..238: note = mAlb Splice Acceptor
  misc_feature 241..966: note = 12843 Anti-TfR scFv
  misc_feature 967..996: note = Linker
  misc_feature 997..3645: note = Alpha-glucosidase (70-952)
  misc_feature 3652..3878: note = SV40 PolyA
  misc_feature 3885..4014: note = 130 bp AAV2 ITR Right
  source 1..4014: mol_type = other DNA
ctgcgcgctcgctcgctcactgaggccgcccgggcaaagcccgggcgtcgggcgacctttggtcgcccggcctcagtgagcgagcgagcgcgcagagagggagtggccaactccatcactaggggttcctagatctcttaggtcagtgaagagaagaacaaaaagcagcatattacagttagttgtcttcatcaatctttaaatatgttgtgtggtttttctctccctgtttccacagttgacatccagatgacccagagccccagcagcctgtctgcctctgtgggtgacagggtgaccattacctgcagagccagccaaagcatcagcagctacctgaactggtaccagcagaagccaggcaaggcccctaagctgctgatctatgctgccagcagcctgcaatctggagtgcctagcagattcagtggctctggctcaggcacagacttcaccctgaccatctccagcctccagcctgaggattttgccacctactactgccagcagagctacagcaccccccctatcacctttggccagggcaccagactggaaatcaagggaggaggaggctctggaggaggaggctctggagggggaggctctgaggtgcagctggtggagtctgggggaggcctggtgcagcctggaggctccctgaggctgagctgtgctgcctcaggcttcaccttcaacatctttgaaatgaactgggtcagacaggcccctggcaaaggcctggaatggatcagctacatcagcagcagaggcacaacaacatactatgctgactctgtgagaggcaggttcacaatcagcagagacaatgccaagaacagcctgtacctgcagatgaacagcctgagagcagaggatacagctgtgtactactgtgccagagactatgaggccaccatcccctttgatttctggggccagggcaccctggttacagtgtccagtggtgggggtggctctgggggtggaggcagtgcccatcctggcagacctagagctgtgcccacacagtgtgatgtgcctccaaacagcagatttgactgtgcccctgacaaggccatcacacaagagcagtgtgaagccagaggctgctgttacatccctgccaagcaaggactgcaaggggctcagatgggacagccctggtgcttcttcccaccatcttaccccagctacaagctggaaaacctgagcagctctgagatgggctacactgctacactgaccagaaccacacctacattcttcccaaaggacatcctgacactgaggctggatgtgatgatggaaacagagaacaggctgcacttcaccatcaaggaccctgccaatagaagatatgaggtgcccctggaaacccctcatgtgcactctagagccccatctccactgtactctgtggaattttctgaggaaccctttggggtcatagtcagaaggcagctggatggcagagtgctgctgaacacaactgtggcccctctgttctttgctgatcagttcctgcagctgagcaccagcctgcctagccagtatatcacaggcctggcagagcacctgtctccactgatgctgagcacatcctggaccagaatcaccctgtggaacagagacctggctcccacacctggggccaacctgtatggctctcaccccttctatctggccctggaagatggtggttcagcccatggtgtctttctgctgaactccaatgccatggatgtggtgctgcagccctctcctgctctgtcttggagaagcactggtggcatcctggatgtgtacatctttctgggccctgagcctaagtctgtggtgcagcagtacctggatgttgtgggctaccccttcatgcctccttattggggcctgggcttccacctgtgcagatggggatacagcagcacagccatcaccagacaggttgtggaaaacatgaccagagcacacttcccactggatgtgcagtggaatgacctggactacatggacagcagaagggacttcaccttcaacaaggatggcttcagagacttccctgccatggtgcaagagctgcaccaaggtggtagaagatatatgatgattgtggacccagccatcagctcctctggaccagctggcagctacagaccctatgatgagggactgagaagaggggtgttcatcaccaatgagacaggccagcctctgattggcaaagtgtggccaggctccacagcctttccagatttcacaaaccccacagctctggcttggtgggaagatatggtggcagagttccatgatcaggtgccctttgatggcatgtggattgacatgaatgagcccagcaacttcatcaggggctctgaggatggatgccccaacaatgaactggaaaatcctccttatgtgcctggtgttgttggagggacactgcaggcagccacaatttgtgccagctctcaccagtttctgagcacccactacaacctgcacaatctgtatggcctgactgaggccattgccagccacagggctcttgtgaaggctagaggcaccagaccttttgtgatcagcaggtccacctttgctggccatggcagatatgctggccactggactggggatgtgtggtctagttgggagcagctggctagctctgtgcctgagatcctgcagttcaacctgctgggagtgccccttgttggagcagatgtgtgtggcttcctgggcaacacctcagaggaactgtgtgtcagatggactcagctgggagcattctaccctttcatgagaaaccacaacagcctgctgagcctgcctcaagagccttacagcttttctgagccagcacagcaggccatgagaaaggccctgactctgagatatgccctgctgcctcacctgtacaccctgttccatcaggctcatgtggctggggagactgtggctagacccctgttcctggaattccccaaggacagctccacctggacagtggatcatcagctgctgtggggagaagccctgctgattacacctgtgctgcaggctggcaaggctgaagtgacaggctacttccctcttggcacttggtatgacctgcagacagtgcctgtggaagctctgggatctctgcctccacctcctgctgctcctagagagcctgccattcactctgaaggccagtgggttaccctgcctgctccactggataccatcaatgtgcatctgagagcaggctacatcatccctctgcaaggccctggcctgaccaccacagaatctagacagcagccaatggcactggctgtggccctgaccaaaggtggagaagctagaggggagctgttctgggatgatggggagagcctggaagtgctggaaagaggggcctatacacaagtgatttttctggctaggaacaataccattgtgaatgagcttgtcagagtcacctctgaaggtgctggcctgcagctccagaaagtgacagtgcttggagtggccacagcaccccagcaagtgctgtctaatggggtgccagtgtccaacttcacatacagccctgataccaaggtcctggacatctgtgtgtccctgcttatgggagagcagttcctggtgtcttggtgctaataatcagccataccacatttgtagaggttttacttgctttaaaaaacctcccacacctccccctgaacctgaaacataaaatgaatgcaattgttgttgttaacttgtttattgcagcttataatggttacaaataaagcaatagcatcacaaatttcacaaataaagcatttttttcactgcattctagttgtggtttgtccaaactcatcaatgtatcttatcatgtcagatctaggaacccctagtgatggagttggccactccctctctgcgcgctcgctcgctcactgaggccgggcgaccaaaggtcgcccgacgcccgggctttgcccgggcggcctcagtgagcgagcgagcgcgcag

SEQ ID NO: 846 - DNA, 4014 bp, synthetic construct
  misc_feature 1..4014: note = Synthetic
  misc_feature 1..130: note = 130 bp AAV2 ITR Left
  misc_feature 139..238: note = mAlb Splice Acceptor
  misc_feature 241..966: note = 12843 Anti-TfR scFv
  misc_feature 967..996: note = Linker
  misc_feature 997..3645: note = Alpha-glucosidase (70-952)
  misc_feature 3652..3878: note = SV40 PolyA
  misc_feature 3885..4014: note = 130 bp AAV2 ITR Right
  source 1..4014: mol_type = other DNA
ctgcgcgctcgctcgctcactgaggccgcccgggcaaagcccgggcgtcgggcgacctttggtcgcccggcctcagtgagcgagcgagcgcgcagagagggagtggccaactccatcactaggggttcctagatctcttaggtcagtgaagagaagaacaaaaagcagcatattacagttagttgtcttcatcaatctttaaatatgttgtgtggtttttctctccctgtttccacagttgatatccaaatgacccagagccccagctccctgtcagcctctgtgggagacagagtgaccatcacatgcagagccagccagagcatcagcagctacctgaactggtaccagcagaagcctggcaaggcccccaagctgctgatctatgctgccagcagcctgcagtctggagtgccttccagattctctggctcaggcagtggcacagacttcaccctgacaatcagcagcctgcagcctgaagactttgccacctactactgccagcagagctacagcacaccacctatcacctttggccagggcaccagactggagatcaaagggggtgggggctctggggggggaggcagtggaggaggtggctctgaagtccagctggtggagtctggaggaggcctggtgcagcctggaggcagcctgaggctgtcctgtgcagcctctggcttcaccttcaacatctttgagatgaactgggttaggcaggcccctggcaagggcctggaatggatcagctacattagcagcagaggcaccacaacctactatgctgactctgtgaggggcagattcaccatcagcagagataatgccaagaacagcctgtacctgcagatgaacagcctcagagctgaggacacagctgtgtactactgtgccagagattatgaggccaccatcccctttgacttctggggccaaggcaccctggtgacagtgtcttctggaggtggaggctctggaggaggtggcagtgcccatcctggcagacctagagctgtgcccacacagtgtgatgtgcctccaaacagcagatttgactgtgcccctgacaaggccatcacacaagagcagtgtgaagccagaggctgctgttacatccctgccaagcaaggactgcaaggggctcagatgggacagccctggtgcttcttcccaccatcttaccccagctacaagctggaaaacctgagcagctctgagatgggctacactgctacactgaccagaaccacacctacattcttcccaaaggacatcctgacactgaggctggatgtgatgatggaaacagagaacaggctgcacttcaccatcaaggaccctgccaatagaagatatgaggtgcccctggaaacccctcatgtgcactctagagccccatctccactgtactctgtggaattttctgaggaaccctttggggtcatagtcagaaggcagctggatggcagagtgctgctgaacacaactgtggcccctctgttctttgctgatcagttcctgcagctgagcaccagcctgcctagccagtatatcacaggcctggcagagcacctgtctccactgatgctgagcacatcctggaccagaatcaccctgtggaacagagacctggctcccacacctggggccaacctgtatggctctcaccccttctatctggccctggaagatggtggttcagcccatggtgtctttctgctgaactccaatgccatggatgtggtgctgcagccctctcctgctctgtcttggagaagcactggtggcatcctggatgtgtacatctttctgggccctgagcctaagtctgtggtgcagcagtacctggatgttgtgggctaccccttcatgcctccttattggggcctgggcttccacctgtgcagatggggatacagcagcacagccatcaccagacaggttgtggaaaacatgaccagagcacacttcccactggatgtgcagtggaatgacctggactacatggacagcagaagggacttcaccttcaacaaggatggcttcagagacttccctgccatggtgcaagagctgcaccaaggtggtagaagatatatgatgattgtggacccagccatcagctcctctggaccagctggcagctacagaccctatgatgagggactgagaagaggggtgttcatcaccaatgagacaggccagcctctgattggcaaagtgtggccaggctccacagcctttccagatttcacaaaccccacagctctggcttggtgggaagatatggtggcagagttccatgatcaggtgccctttgatggcatgtggattgacatgaatgagcccagcaacttcatcaggggctctgaggatggatgccccaacaatgaactggaaaatcctccttatgtgcctggtgttgttggagggacactgcaggcagccacaatttgtgccagctctcaccagtttctgagcacccactacaacctgcacaatctgtatggcctgactgaggccattgccagccacagggctcttgtgaaggctagaggcaccagaccttttgtgatcagcaggtccacctttgctggccatggcagatatgctggccactggactggggatgtgtggtctagttgggagcagctggctagctctgtgcctgagatcctgcagttcaacctgctgggagtgccccttgttggagcagatgtgtgtggcttcctgggcaacacctcagaggaactgtgtgtcagatggactcagctgggagcattctaccctttcatgagaaaccacaacagcctgctgagcctgcctcaagagccttacagcttttctgagccagcacagcaggccatgagaaaggccctgactctgagatatgccctgctgcctcacctgtacaccctgttccatcaggctcatgtggctggggagactgtggctagacccctgttcctggaattccccaaggacagctccacctggacagtggatcatcagctgctgtggggagaagccctgctgattacacctgtgctgcaggctggcaaggctgaagtgacaggctacttccctcttggcacttggtatgacctgcagacagtgcctgtggaagctctgggatctctgcctccacctcctgctgctcctagagagcctgccattcactctgaaggccagtgggttaccctgcctgctccactggataccatcaatgtgcatctgagagcaggctacatcatccctctgcaaggccctggcctgaccaccacagaatctagacagcagccaatggcactggctgtggccctgaccaaaggtggagaagctagaggggagctgttctgggatgatggggagagcctggaagtgctggaaagaggggcctatacacaagtgatttttctggctaggaacaataccattgtgaatgagcttgtcagagtcacctctgaaggtgctggcctgcagctccagaaagtgacagtgcttggagtggccacagcaccccagcaagtgctgtctaatggggtgccagtgtccaacttcacatacagccctgataccaaggtcctggacatctgtgtgtccctgcttatgggagagcagttcctggtgtcttggtgctaataatcagccataccacatttgtagaggttttacttgctttaaaaaacctcccacacctccccctgaacctgaaacataaaatgaatgcaattgttgttgttaacttgtttattgcagcttataatggttacaaataaagcaatagcatcacaaatttcacaaataaagcatttttttcactgcattctagttgtggtttgtccaaactcatcaatgtatcttatcatgtcagatctaggaacccctagtgatggagttggccactccctctctgcgcgctcgctcgctcactgaggccgggcgaccaaaggtcgcccgacgcccgggctttgcccgggcggcctcagtgagcgagcgagcgcgcag

SEQ ID NO: 847 - DNA, 4020 bp, synthetic construct
  misc_feature 1..4020: note = Synthetic
  misc_feature 1..130: note = 130 bp AAV2 ITR Left
  misc_feature 139..238: note = mAlb Splice Acceptor
  misc_feature 241..972: note = 12843 Anti-TfR scFv
  misc_feature 973..1002: note = Linker
  misc_feature 1003..3651: note = Alpha-glucosidase (70-952)
  misc_feature 3658..3884: note = SV40 PolyA
  misc_feature 3891..4020: note = 130 bp AAV2 ITR Right
  source 1..4020: mol_type = other DNA
ctgcgcgctcgctcgctcactgaggccgcccgggcaaagcccgggcgtcgggcgacctttggtcgcccggcctcagtgagcgagcgagcgcgcagagagggagtggccaactccatcactaggggttcctagatctcttaggtcagtgaagagaagaacaaaaagcagcatattacagttagttgtcttcatcaatctttaaatatgttgtgtggtttttctctccctgtttccacagttgacatccagatgacccagtctccatcctccctgtctgcatctgtaggagacagagtcaccatcacttgccgggcaagtcagagcattagcagctatttaaattggtatcagcagaaaccagggaaagcccctaagctcctgatctatgctgcatccagtttgcaaagtggggtcccgtcaaggttcagtggcagtggatctgggacagatttcactctcaccatcagcagtctgcaacctgaagattttgcaacttactactgtcaacagagttacagtacccctccgatcaccttcggccaagggacacgactggagattaaaggcggcggcggaagcggagggggaggatcaggaggaggcggatccgaagtgcagctggtggagtctgggggaggcttggttcagcctggcaggtccctgagactctcctgtgcagcctctggattcacctttgatgattatgccatgaactgggtccggcaagctccagggaagggcctggagtgggtctcaggtattagttggagtagtggtagcatggactatgcggactctgtgaagggccgattcaccatctccagagacaacgccaaaaactccctgtatctgcaaatgaacagtctgagaactgaggacacggccttatattactgtgcaaaagctagggaagttggagactactacggtatggacgtctggggccaagggaccacggtcaccgtctcctcaggaggtggtggaagtggaggtggtggaagtgcacaccccggccgtcccagagcagtgcccacacagtgcgacgtcccccccaacagccgcttcgattgcgcccctgacaaggccatcacccaggaacagtgcgaggcccgcggctgttgctacatccctgcaaagcaggggctgcagggagcccagatggggcagccctggtgcttcttcccacccagctaccccagctacaagctggagaacctgagctcctctgaaatgggctacacggccaccctgacccgtaccacccccaccttcttccccaaggacatcctgaccctgcggctggacgtgatgatggagactgagaaccgcctccacttcacgatcaaagatccagctaacaggcgctacgaggtgcccttggagaccccgcatgtccacagccgggcaccgtccccactctacagcgtggagttctccgaggagcccttcggggtgatcgtgcgccggcagctggacggccgcgtgctgctgaacacgacggtggcgcccctgttctttgcggaccagttccttcagctgtccacctcgctgccctcgcagtatatcacaggcctcgccgagcacctcagtcccctgatgctcagcaccagctggaccaggatcaccctgtggaaccgggaccttgcgcccacgcccggtgcgaacctctacgggtctcaccctttctacctggcgctggaggacggcgggtcggcacacggggtgttcctgctaaacagcaatgccatggatgtggtcctgcagccgagccctgcccttagctggaggtcgacaggtgggatcctggatgtctacatcttcctgggcccagagcccaagagcgtggtgcagcagtacctggacgttgtgggatacccgttcatgccgccatactggggcctgggcttccacctgtgccgctggggctactcctccaccgctatcacccgccaggtggtggagaacatgaccagggcccacttccccctggacgtccagtggaacgacctggactacatggactcccggagggacttcacgttcaacaaggatggcttccgggacttcccggccatggtgcaggagctgcaccagggcggccggcgctacatgatgatcgtggatcctgccatcagcagctcgggccctgccgggagctacaggccctacgacgagggtctgcggaggggggttttcatcaccaacgagaccggccagccgctgattgggaaggtatggcccgggtccactgccttccccgacttcaccaaccccacagccctggcctggtgggaggacatggtggctgagttccatgaccaggtgcccttcgacggcatgtggattgacatgaacgagccttccaacttcatcaggggctctgaggacggctgccccaacaatgagctggagaacccaccctacgtgcctggggtggttggggggaccctccaggcggccaccatctgtgcctccagccaccagtttctctccacacactacaacctgcacaacctctacggcctgaccgaagccatcgcctcccacagggcgctggtgaaggctcgggggacacgcccatttgtgatctcccgctcgacctttgctggccacggccgatacgccggccactggacgggggacgtgtggagctcctgggagcagctcgcctcctccgtgccagaaatcctgcagtttaacctgctgggggtgcctctggtcggggccgacgtctgcggcttcctgggcaacacctcagaggagctgtgtgtgcgctggacccagctgggggccttctaccccttcatgcggaaccacaacagcctgctcagtctgccccaggagccgtacagcttcagcgagccggcccagcaggccatgaggaaggccctcaccctgcgctacgcactcctcccccacctctacacactgttccaccaggcccacgtcgcgggggagaccgtggcccggcccctcttcctggagttccccaaggactctagcacctggactgtggaccaccagctcctgtggggggaggccctgctcatcaccccagtgctccaggccgggaaggccgaagtgactggctacttccccttgggcacatggtacgacctgcagacggtgccagtagaggcccttggcagcctcccacccccacctgcagctccccgtgagccagccatccacagcgaggggcagtgggtgacgctgccggcccccctggacaccatcaacgtccacctccgggctgggtacatcatccccctgcagggccctggcctcacaaccacagagtcccgccagcagcccatggccctggctgtggccctgaccaagggtggggaggcccgaggggagctgttctgggacgatggagagagcctggaagtgctggagcgaggggcctacacacaggtcatcttcctggccaggaataacacgatcgtgaatgagctggtacgtgtgaccagtgagggagctggcctgcagctgcagaaggtgactgtcctgggcgtggccacggcgccccagcaggtcctctccaacggtgtccctgtctccaacttcacctacagccccgacaccaaggtcctggacatctgtgtctcgctgttgatgggagagcagtttctcgtcagctggtgttaataatcagccataccacatttgtagaggttttacttgctttaaaaaacctcccacacctccccctgaacctgaaacataaaatgaatgcaattgttgttgttaacttgtttattgcagcttataatggttacaaataaagcaatagcatcacaaatttcacaaataaagcatttttttcactgcattctagttgtggtttgtccaaactcatcaatgtatcttatcatgtcagatctaggaacccctagtgatggagttggccactccctctctgcgcgctcgctcgctcactgaggccgggcgaccaaaggtcgcccgacgcccgggctttgcccgggcggcctcagtgagcgagcgagcgcgcag

SEQ ID NO: 848 - DNA, 4020 bp, synthetic construct
  misc_feature 1..4020: note = Synthetic
  misc_feature 1..130: note = 130 bp AAV2 ITR Left
  misc_feature 139..238: note = mAlb Splice Acceptor
  misc_feature 241..972: note = 12843 Anti-TfR scFv
  misc_feature 973..1002: note = Linker
  misc_feature 1003..3651: note = Alpha-glucosidase (70-952)
  misc_feature 3658..3884: note = SV40 PolyA
  misc_feature 3891..4020: note = 130 bp AAV2 ITR Right
  source 1..4020: mol_type = other DNA
ctgcgcgctcgctcgctcactgaggccgcccgggcaaagcccgggcgtcgggcgacctttggtcgcccggcctcagtgagcgagcgagcgcgcagagagggagtggccaactccatcactaggggttcctagatctcttaggtcagtgaagagaagaacaaaaagcagcatattacagttagttgtcttcatcaatctttaaatatgttgtgtggtttttctctccctgtttccacagttgacatccagatgacacagagcccctctagcctgtctgcctctgtgggagacagagtgaccatcacctgtagagccagccagagcatcagcagctacctgaactggtatcagcagaagcctggcaaggcccctaaactgctgatctatgctgccagcagcctgcagtctggggtgccctctagattttctggcagtggctctggcacagacttcaccctgaccataagctccctgcagcctgaggactttgccacctactactgtcagcagagctacagcacccctcctatcacctttggccagggcaccagactggaaatcaaaggtggtggtggaagtggtggtggtggcagtggtggtggtggatctgaagtgcagctggtggaaagtggtggtggcctggttcagcctggcagatccctgagactgagctgtgcagcctctggctttacctttgatgactatgccatgaactgggtcagacaggccccaggcaaaggcctggaatgggtgtcaggcatctcttggtcctctggctccatggactatgctgactctgtgaagggcagattcaccatcagcagagacaatgccaagaacagcctgtacctgcagatgaactccctgagaacagaggacacagccctgtactactgtgccaaggccagagaagtgggagactactatggcatggatgtgtggggccagggaaccacagtgacagtcagtagtggtggtggtggcagtggtggtggtggttctgcccatcctggcagacctagagctgtgcccacacagtgtgatgtgcctccaaacagcagatttgactgtgcccctgacaaggccatcacacaagagcagtgtgaagccagaggctgctgttacatccctgccaagcaaggactgcaaggggctcagatgggacagccctggtgcttcttcccaccatcttaccccagctacaagctggaaaacctgagcagctctgagatgggctacactgctacactgaccagaaccacacctacattcttcccaaaggacatcctgacactgaggctggatgtgatgatggaaacagagaacaggctgcacttcaccatcaaggaccctgccaatagaagatatgaggtgcccctggaaacccctcatgtgcactctagagccccatctccactgtactctgtggaattttctgaggaaccctttggggtcatagtcagaaggcagctggatggcagagtgctgctgaacacaactgtggcccctctgttctttgctgatcagttcctgcagctgagcaccagcctgcctagccagtatatcacaggcctggcagagcacctgtctccactgatgctgagcacatcctggaccagaatcaccctgtggaacagagacctggctcccacacctggggccaacctgtatggctctcaccccttctatctggccctggaagatggtggttcagcccatggtgtctttctgctgaactccaatgccatggatgtggtgctgcagccctctcctgctctgtcttggagaagcactggtggcatcctggatgtgtacatctttctgggccctgagcctaagtctgtggtgcagcagtacctggatgttgtgggctaccccttcatgcctccttattggggcctgggcttccacctgtgcagatggggatacagcagcacagccatcaccagacaggttgtggaaaacatgaccagagcacacttcccactggatgtgcagtggaatgacctggactacatggacagcagaagggacttcaccttcaacaaggatggcttcagagacttccctgccatggtgcaagagctgcaccaaggtggtagaagatatatgatgattgtggacccagccatcagctcctctggaccagctggcagctacagaccctatgatgagggactgagaagaggggtgttcatcaccaatgagacaggccagcctctgattggcaaagtgtggccaggctccacagcctttccagatttcacaaaccccacagctctggcttggtgggaagatatggtggcagagttccatgatcaggtgccctttgatggcatgtggattgacatgaatgagcccagcaacttcatcaggggctctgaggatggatgccccaacaatgaactggaaaatcctccttatgtgcctggtgttgttggagggacactgcaggcagccacaatttgtgccagctctcaccagtttctgagcacccactacaacctgcacaatctgtatggcctgactgaggccattgccagccacagggctcttgtgaaggctagaggcaccagaccttttgtgatcagcaggtccacctttgctggccatggcagatatgctggccactggactggggatgtgtggtctagttgggagcagctggctagctctgtgcctgagatcctgcagttcaacctgctgggagtgccccttgttggagcagatgtgtgtggcttcctgggcaacacctcagaggaactgtgtgtcagatggactcagctgggagcattctaccctttcatgagaaaccacaacagcctgctgagcctgcctcaagagccttacagcttttctgagccagcacagcaggccatgagaaaggccctgactctgagatatgccctgctgcctcacctgtacaccctgttccatcaggctcatgtggctggggagactgtggctagacccctgttcctggaattccccaaggacagctccacctggacagtggatcatcagctgctgtggggagaagccctgctgattacacctgtgctgcaggctggcaaggctgaagtgacaggctacttccctcttggcacttggtatgacctgcagacagtgcctgtggaagctctgggatctctgcctccacctcctgctgctcctagagagcctgccattcactctgaaggccagtgggttaccctgcctgctccactggataccatcaatgtgcatctgagagcaggctacatcatccctctgcaaggccctggcctgaccaccacagaatctagacagcagccaatggcactggctgtggccctgaccaaaggtggagaagctagaggggagctgttctgggatgatggggagagcctggaagtgctggaaagaggggcctatacacaagtgatttttctggctaggaacaataccattgtgaatgagcttgtcagagtcacctctgaaggtgctggcctgcagctccagaaagtgacagtgcttggagtggccacagcaccccagcaagtgctgtctaatggggtgccagtgtccaacttcacatacagccctgataccaaggtcctggacatctgtgtgtccctgcttatgggagagcagttcctggtgtcttggtgctaataatcagccataccacatttgtagaggttttacttgctttaaaaaacctcccacacctccccctgaacctgaaacataaaatgaatgcaattgttgttgttaacttgtttattgcagcttataatggttacaaataaagcaatagcatcacaaatttcacaaataaagcatttttttcactgcattctagttgtggtttgtccaaactcatcaatgtatcttatcatgtcagatctaggaacccctagtgatggagttggccactccctctctgcgcgctcgctcgctcactgaggccgggcgaccaaaggtcgcccgacgcccgggctttgcccgggcggcctcagtgagcgagcgagcgcgcag

SEQ ID NO: 849 - DNA, 4020 bp, synthetic construct
  misc_feature 1..4020: note = Synthetic
  misc_feature 1..130: note = 130 bp AAV2 ITR Left
  misc_feature 139..238: note = mAlb Splice Acceptor
  misc_feature 241..972: note = 12843 Anti-TfR scFv
  misc_feature 973..1002: note = Linker
  misc_feature 1003..3651: note = Alpha-glucosidase (70-952)
  misc_feature 3658..3884: note = SV40 PolyA
  misc_feature 3891..4020: note = 130 bp AAV2 ITR Right
  source 1..4020: mol_type = other DNA
ctgcgcgctcgctcgctcactgaggccgcccgggcaaagcccgggcgtcgggcgacctttggtcgcccggcctcagtgagcgagcgagcgcgcagagagggagtggccaactccatcactaggggttcctagatctcttaggtcagtgaagagaagaacaaaaagcagcatattacagttagttgtcttcatcaatctttaaatatgttgtgtggtttttctctccctgtttccacagttgatatccagatgacccagagccccagcagcctgtctgccagtgtgggggatagagtgaccatcacctgcagggccagccagagcatcagcagctacctcaactggtaccagcaaaagcctggcaaggcccccaaactgctgatttatgctgccagcagcctgcagtctggggtcccttccagattctctggctctggctctggcacagacttcaccctgaccatcagcagcctgcagccagaggactttgccacatactactgccagcagagctacagcaccccccctatcacctttggccagggcaccaggctggagatcaagggaggtgggggctcaggaggaggtggctctggaggaggaggctcagaggtgcagctggttgagagtggaggaggcctggtgcagcctggcagaagcctgagactgagctgtgctgcctctggcttcacctttgatgactatgccatgaactgggtgagacaggcccctggcaagggcctggaatgggtgtctggcatctcctggagctctggcagcatggactatgctgactctgtgaagggcaggttcaccatcagcagagacaatgccaagaacagcctgtacctgcagatgaacagcctgagaacagaagacacagccctgtactactgtgcaaaagccagagaagtgggagactactatggcatggatgtgtggggccaaggcaccacagtgacagtgagcagtggtggaggtggctcagggggaggaggcagtgcccatcctggcagacctagagctgtgcccacacagtgtgatgtgcctccaaacagcagatttgactgtgcccctgacaaggccatcacacaagagcagtgtgaagccagaggctgctgttacatccctgccaagcaaggactgcaaggggctcagatgggacagccctggtgcttcttcccaccatcttaccccagctacaagctggaaaacctgagcagctctgagatgggctacactgctacactgaccagaaccacacctacattcttcccaaaggacatcctgacactgaggctggatgtgatgatggaaacagagaacaggctgcacttcaccatcaaggaccctgccaatagaagatatgaggtgcccctggaaacccctcatgtgcactctagagccccatctccactgtactctgtggaattttctgaggaaccctttggggtcatagtcagaaggcagctggatggcagagtgctgctgaacacaactgtggcccctctgttctttgctgatcagttcctgcagctgagcaccagcctgcctagccagtatatcacaggcctggcagagcacctgtctccactgatgctgagcacatcctggaccagaatcaccctgtggaacagagacctggctcccacacctggggccaacctgtatggctctcaccccttctatctggccctggaagatggtggttcagcccatggtgtctttctgctgaactccaatgccatggatgtggtgctgcagccctctcctgctctgtcttggagaagcactggtggcatcctggatgtgtacatctttctgggccctgagcctaagtctgtggtgcagcagtacctggatgttgtgggctaccccttcatgcctccttattggggcctgggcttccacctgtgcagatggggatacagcagcacagccatcaccagacaggttgtggaaaacatgaccagagcacacttcccactggatgtgcagtggaatgacctggactacatggacagcagaagggacttcaccttcaacaaggatggcttcagagacttccctgccatggtgcaagagctgcaccaaggtggtagaagatatatgatgattgtggacccagccatcagctcctctggaccagctggcagctacagaccctatgatgagggactgagaagaggggtgttcatcaccaatgagacaggccagcctctgattggcaaagtgtggccaggctccacagcctttccagatttcacaaaccccacagctctggcttggtgggaagatatggtggcagagttccatgatcaggtgccctttgatggcatgtggattgacatgaatgagcccagcaacttcatcaggggctctgaggatggatgccccaacaatgaactggaaaatcctccttatgtgcctggtgttgttggagggacactgcaggcagccacaatttgtgccagctctcaccagtttctgagcacccactacaacctgcacaatctgtatggcctgactgaggccattgccagccacagggctcttgtgaaggctagaggcaccagaccttttgtgatcagcaggtccacctttgctggccatggcagatatgctggccactggactggggatgtgtggtctagttgggagcagctggctagctctgtgcctgagatcctgcagttcaacctgctgggagtgccccttgttggagcagatgtgtgtggcttcctgggcaacacctcagaggaactgtgtgtcagatggactcagctgggagcattctaccctttcatgagaaaccacaacagcctgctgagcctgcctcaagagccttacagcttttctgagccagcacagcaggccatgagaaaggccctgactctgagatatgccctgctgcctcacctgtacaccctgttccatcaggctcatgtggctggggagactgtggctagacccctgttcctggaattccccaaggacagctccacctggacagtggatcatcagctgctgtggggagaagccctgctgattacacctgtgctgcaggctggcaaggctgaagtgacaggctacttccctcttggcacttggtatgacctgcagacagtgcctgtggaagctctgggatctctgcctccacctcctgctgctcctagagagcctgccattcactctgaaggccagtgggttaccctgcctgctccactggataccatcaatgtgcatctgagagcaggctacatcatccctctgcaaggccctggcctgaccaccacagaatctagacagcagccaatggcactggctgtggccctgaccaaaggtggagaagctagaggggagctgttctgggatgatggggagagcctggaagtgctggaaagaggggcctatacacaagtgatttttctggctaggaacaataccattgtgaatgagcttgtcagagtcacctctgaaggtgctggcctgcagctccagaaagtgacagtgcttggagtggccacagcaccccagcaagtgctgtctaatggggtgccagtgtccaacttcacatacagccctgataccaaggtcctggacatctgtgtgtccctgcttatgggagagcagttcctggtgtcttggtgctaataatcagccataccacatttgtagaggttttacttgctttaaaaaacctcccacacctccccctgaacctgaaacataaaatgaatgcaattgttgttgttaacttgtttattgcagcttataatggttacaaataaagcaatagcatcacaaatttcacaaataaagcatttttttcactgcattctagttgtggtttgtccaaactcatcaatgtatcttatcatgtcagatctaggaacccctagtgatggagttggccactccctctctgcgcgctcgctcgctcactgaggccgggcgaccaaaggtcgcccgacgcccgggctttgcccgggcggcctcagtgagcgagcgagcgcgcag

SEQ ID NO: 850 - DNA, 4020 bp, synthetic construct
  misc_feature 1..4020: note = Synthetic
  misc_feature 1..130: note = 130 bp AAV2 ITR Left
  misc_feature 139..238: note = mAlb Splice Acceptor
  misc_feature 241..972: note = 12843 Anti-TfR scFv
  misc_feature 973..1002: note = Linker
  misc_feature 1003..3651: note = Alpha-glucosidase (70-952)
  misc_feature 3658..3884: note = SV40 PolyA
  misc_feature 3891..4020: note = 130 bp AAV2 ITR Right
  source 1..4020: mol_type = other DNA
ctgcgcgctcgctcgctcactgaggccgcccgggcaaagcccgggcgtcgggcgacctttggtcgcccggcctcagtgagcgagcgagcgcgcagagagggagtggccaactccatcactaggggttcctagatctcttaggtcagtgaagagaagaacaaaaagcagcatattacagttagttgtcttcatcaatctttaaatatgttgtgtggtttttctctccctgtttccacagttgacatccagatgacccagagccccagctccctgtcagccagtgtgggtgacagagtgaccatcacctgcagagccagccagagcatcagcagctacctgaactggtaccagcagaaacctggcaaagcccccaagctgctgatttatgctgctagcagcctgcagagtggagtgcccagcagattctcaggcagtggctctggcacagacttcaccctgaccatctccagcctgcagccagaagactttgccacctactactgccagcagagctacagcacccctcctatcacctttggccagggcacaagactggagatcaagggaggaggaggctctggaggaggaggctctggagggggaggctctgaggtccaactggttgaatctggagggggcctggtgcaacctggcaggagcctgagactgagctgtgctgcctctggcttcacctttgatgactatgccatgaactgggtgagacaggcccctggcaagggcctggagtgggtgtctggcatcagctggagctctggcagcatggactatgcagattctgtgaagggcaggttcaccatcagcagagataatgccaagaacagcctgtacctgcagatgaacagcctcaggacagaggacacagccctgtactactgtgccaaggccagagaagtgggtgactactatggcatggatgtgtggggccagggcaccacagtgacagtgagctctgggggaggaggctcaggtgggggtggcagtgcccatcctggcagacctagagctgtgcccacacagtgtgatgtgcctccaaacagcagatttgactgtgcccctgacaaggccatcacacaagagcagtgtgaagccagaggctgctgttacatccctgccaagcaaggactgcaaggggctcagatgggacagccctggtgcttcttcccaccatcttaccccagctacaagctggaaaacctgagcagctctgagatgggctacactgctacactgaccagaaccacacctacattcttcccaaaggacatcctgacactgaggctggatgtgatgatggaaacagagaacaggctgcacttcaccatcaaggaccctgccaatagaagatatgaggtgcccctggaaacccctcatgtgcactctagagccccatctccactgtactctgtggaattttctgaggaaccctttggggtcatagtcagaaggcagctggatggcagagtgctgctgaacacaactgtggcccctctgttctttgctgatcagttcctgcagctgagcaccagcctgcctagccagtatatcacaggcctggcagagcacctgtctccactgatgctgagcacatcctggaccagaatcaccctgtggaacagagacctggctcccacacctggggccaacctgtatggctctcaccccttctatctggccctggaagatggtggttcagcccatggtgtctttctgctgaactccaatgccatggatgtggtgctgcagccctctcctgctctgtcttggagaagcactggtggcatcctggatgtgtacatctttctgggccctgagcctaagtctgtggtgcagcagtacctggatgttgtgggctaccccttcatgcctccttattggggcctgggcttccacctgtgcagatggggatacagcagcacagccatcaccagacaggttgtggaaaacatgaccagagcacacttcccactggatgtgcagtggaatgacctggactacatggacagcagaagggacttcaccttcaacaaggatggcttcagagacttccctgccatggtgcaagagctgcaccaaggtggtagaagatatatgatgattgtggacccagccatcagctcctctggaccagctggcagctacagaccctatgatgagggactgagaagaggggtgttcatcaccaatgagacaggccagcctctgattggcaaagtgtggccaggctccacagcctttccagatttcacaaaccccacagctctggcttggtgggaagatatggtggcagagttccatgatcaggtgccctttgatggcatgtggattgacatgaatgagcccagcaacttcatcaggggctctgaggatggatgccccaacaatgaactggaaaatcctccttatgtgcctggtgttgttggagggacactgcaggcagccacaatttgtgccagctctcaccagtttctgagcacccactacaacctgcacaatctgtatggcctgactgaggccattgccagccacagggctcttgtgaaggctagaggcaccagaccttttgtgatcagcaggtccacctttgctggccatggcagatatgctggccactggactggggatgtgtggtctagttgggagcagctggctagctctgtgcctgagatcctgcagttcaacctgctgggagtgccccttgttggagcagatgtgtgtggcttcctgggcaacacctcagaggaactgtgtgtcagatggactcagctgggagcattctaccctttcatgagaaaccacaacagcctgctgagcctgcctcaagagccttacagcttttctgagccagcacagcaggccatgagaaaggccctgactctgagatatgccctgctgcctcacctgtacaccctgttccatcaggctcatgtggctggggagactgtggctagacccctgttcctggaattccccaaggacagctccacctggacagtggatcatcagctgctgtggggagaagccctgctgattacacctgtgctgcaggctggcaaggctgaagtgacaggctacttccctcttggcacttggtatgacctgcagacagtgcctgtggaagctctgggatctctgcctccacctcctgctgctcctagagagcctgccattcactctgaaggccagtgggttaccctgcctgctccactggataccatcaatgtgcatctgagagcaggctacatcatccctctgcaaggccctggcctgaccaccacagaatctagacagcagccaatggcactggctgtggccctgaccaaaggtggagaagctagaggggagctgttctgggatgatggggagagcctggaagtgctggaaagaggggcctatacacaagtgatttttctggctaggaacaataccattgtgaatgagcttgtcagagtcacctctgaaggtgctggcctgcagctccagaaagtgacagtgcttggagtggccacagcaccccagcaagtgctgtctaatggggtgccagtgtccaacttcacatacagccctgataccaaggtcctggacatctgtgtgtccctgcttatgggagagcagttcctggtgtcttggtgctaataatcagccataccacatttgtagaggttttacttgctttaaaaaacctcccacacctccccctgaacctgaaacataaaatgaatgcaattgttgttgttaacttgtttattgcagcttataatggttacaaataaagcaatagcatcacaaatttcacaaataaagcatttttttcactgcattctagttgtggtttgtccaaactcatcaatgtatcttatcatgtcagatctaggaacccctagtgatggagttggccactccctctctgcgcgctcgctcgctcactgaggccgggcgaccaaaggtcgcccgacgcccgggctttgcccgggcggcctcagtgagcgagcgagcgcgcag

SEQ ID NO: 851 - DNA, 3993 bp, synthetic construct
  misc_feature 1..3993: note = Synthetic
  misc_feature 1..130: note = 130 bp AAV2 ITR Left
  misc_feature 139..238: note = mAlb Splice Acceptor
  misc_feature 241..960: note = 12843 Anti-TfR scFv
  misc_feature 961..975: note = Linker
  misc_feature 976..3624: note = Alpha-glucosidase (70-952)
  misc_feature 3631..3857: note = SV40 PolyA
  misc_feature 3864..3993: note = 130 bp AAV2 ITR Right
  source 1..3993: mol_type = other DNA
ctgcgcgctcgctcgctcactgaggccgcccgggcaaagcccgggcgtcgggcgacctttggtcgcccggcctcagtgagcgagcgagcgcgcagagagggagtggccaactccatcactaggggttcctagatctcttaggtcagtgaagagaagaacaaaaagcagcatattacagttagttgtcttcatcaatctttaaatatgttgtgtggtttttctctccctgtttccacagttcaggtccagctgcaagagtctggccccaaggtggtcaagccctctgagacactgagcctgacctgcacagtgtctggtggcagcatcagcagctactactggaactggatcagacagagccctggcaaaggcctggaatggattggctacaccaagagaggctacacagactacaaccccagcctgagaagcagagtgaccatctctgaggacaccagcaagaaccagttcagcctgaggatcagctctgtgacagctgctgacacagcagtgtactactgtgcccagatgggctggggcagccatgcctttgatatgtggggccagggcacaatggtggctgtgtccagtgggggctcaggaggaggtggctcaggaggtggaggttcaggaggggagattgtgctgacccagtctcctggcacactgtctctgagccctggggaaagagccacactgagctgtagagccagccagtctgtgtcctctagctacctggcctggtatcagcagaagcctggacaggctcccagactgctgatctatggggcctcttctagagccacaggcatccctgacagattcagtggcagtggctctggcacagacttcaccctgaccatcagcagactggaacctgaggactttgctgtgtactattgccagcagtatggcagcagcccctggacatttggacagggcaccaaggtggaaatcaaaggtggtggtggctctgcccatcctggcagacctagagctgtgcccacacagtgtgatgtgcctccaaacagcagatttgactgtgcccctgacaaggccatcacacaagagcagtgtgaagccagaggctgctgttacatccctgccaagcaaggactgcaaggggctcagatgggacagccctggtgcttcttcccaccatcttaccccagctacaagctggaaaacctgagcagctctgagatgggctacactgctacactgaccagaaccacacctacattcttcccaaaggacatcctgacactgaggctggatgtgatgatggaaacagagaacaggctgcacttcaccatcaaggaccctgccaatagaagatatgaggtgcccctggaaacccctcatgtgcactctagagccccatctccactgtactctgtggaattttctgaggaaccctttggggtcatagtcagaaggcagctggatggcagagtgctgctgaacacaactgtggcccctctgttctttgctgatcagttcctgcagctgagcaccagcctgcctagccagtatatcacaggcctggcagagcacctgtctccactgatgctgagcacatcctggaccagaatcaccctgtggaacagagacctggctcccacacctggggccaacctgtatggctctcaccccttctatctggccctggaagatggtggttcagcccatggtgtctttctgctgaactccaatgccatggatgtggtgctgcagccctctcctgctctgtcttggagaagcactggtggcatcctggatgtgtacatctttctgggccctgagcctaagtctgtggtgcagcagtacctggatgttgtgggctaccccttcatgcctccttattggggcctgggcttccacctgtgcagatggggatacagcagcacagccatcaccagacaggttgtggaaaacatgaccagagcacacttcccactggatgtgcagtggaatgacctggactacatggacagcagaagggacttcaccttcaacaaggatggcttcagagacttccctgccatggtgcaagagctgcaccaaggtggtagaagatatatgatgattgtggacccagccatcagctcctctggaccagctggcagctacagaccctatgatgagggactgagaagaggggtgttcatcaccaatgagacaggccagcctctgattggcaaagtgtggccaggctccacagcctttccagatttcacaaaccccacagctctggcttggtgggaagatatggtggcagagttccatgatcaggtgccctttgatggcatgtggattgacatgaatgagcccagcaacttcatcaggggctctgaggatggatgccccaacaatgaactggaaaatcctccttatgtgcctggtgttgttggagggacactgcaggcagccacaatttgtgccagctctcaccagtttctgagcacccactacaacctgcacaatctgtatggcctgactgaggccattgccagccacagggctcttgtgaaggctagaggcaccagaccttttgtgatcagcaggtccacctttgctggccatggcagatatgctggccactggactggggatgtgtggtctagttgggagcagctggctagctctgtgcctgagatcctgcagttcaacctgctgggagtgccccttgttggagcagatgtgtgtggcttcctgggcaacacctcagaggaactgtgtgtcagatggactcagctgggagcattctaccctttcatgagaaaccacaacagcctgctgagcctgcctcaagagccttacagcttttctgagccagcacagcaggccatgagaaaggccctgactctgagatatgccctgctgcctcacctgtacaccctgttccatcaggctcatgtggctggggagactgtggctagacccctgttcctggaattccccaaggacagctccacctggacagtggatcatcagctgctgtggggagaagccctgctgattacacctgtgctgcaggctggcaaggctgaagtgacaggctacttccctcttggcacttggtatgacctgcagacagtgcctgtggaagctctgggatctctgcctccacctcctgctgctcctagagagcctgccattcactctgaaggccagtgggttaccctgcctgctccactggataccatcaatgtgcatctgagagcaggctacatcatccctctgcaaggccctggcctgaccaccacagaatctagacagcagccaatggcactggctgtggccctgaccaaaggtggagaagctagaggggagctgttctgggatgatggggagagcctggaagtgctggaaagaggggcctatacacaagtgatttttctggctaggaacaataccattgtgaatgagcttgtcagagtcacctctgaaggtgctggcctgcagctccagaaagtgacagtgcttggagtggccacagcaccccagcaagtgctgtctaatggggtgccagtgtccaacttcacatacagccctgataccaaggtcctggacatctgtgtgtccctgcttatgggagagcagttcctggtgtcttggtgctaataatcagccataccacatttgtagaggttttacttgctttaaaaaacctcccacacctccccctgaacctgaaacataaaatgaatgcaattgttgttgttaacttgtttattgcagcttataatggttacaaataaagcaatagcatcacaaatttcacaaataaagcatttttttcactgcattctagttgtggtttgtccaaactcatcaatgtatcttatcatgtcagatctaggaacccctagtgatggagttggccactccctctctgcgcgctcgctcgctcactgaggccgggcgaccaaaggtcgcccgacgcccgggctttgcccgggcggcctcagtgagcgagcgagcgcgcag

SEQ ID NO: 852 - DNA, 3411 bp, synthetic construct
  source 1..3411: mol_type = other DNA
gacatccagatgacccagagccccagctccctgtcagccagtgtgggtgacagagtgaccatcacctgcagagccagccagagcatcagcagctacctgaactggtaccagcagaaacctggcaaagcccccaagctgctgatttatgctgctagcagcctgcagagtggagtgcccagcagattctcaggcagtggctctggcacagacttcaccctgaccatctccagcctgcagccagaagactttgccacctactactgccagcagagctacagcacccctcctatcacctttggccagggcacaagactggagatcaagggaggaggaggctctggaggaggaggctctggagggggaggctctgaggtccaactggttgaatctggagggggcctggtgcaacctggcaggagcctgagactgagctgtgctgcctctggcttcacctttgatgactatgccatgaactgggtgagacaggcccctggcaagggcctggagtgggtgtctggcatcagctggagctctggcagcatggactatgcagattctgtgaagggcaggttcaccatcagcagagataatgccaagaacagcctgtacctgcagatgaacagcctcaggacagaggacacagccctgtactactgtgccaaggccagagaagtgggtgactactatggcatggatgtgtggggccagggcaccacagtgacagtgagctctgggggaggaggctcaggtgggggtggcagtgcccatcctggcagacctagagctgtgcccacacagtgtgatgtgcctccaaacagcagatttgactgtgcccctgacaaggccatcacacaagagcagtgtgaagccagaggctgctgttacatccctgccaagcaaggactgcaaggggctcagatgggacagccctggtgcttcttcccaccatcttaccccagctacaagctggaaaacctgagcagctctgagatgggctacactgctacactgaccagaaccacacctacattcttcccaaaggacatcctgacactgaggctggatgtgatgatggaaacagagaacaggctgcacttcaccatcaaggaccctgccaatagaagatatgaggtgcccctggaaacccctcatgtgcactctagagccccatctccactgtactctgtggaattttctgaggaaccctttggggtcatagtcagaaggcagctggatggcagagtgctgctgaacacaactgtggcccctctgttctttgctgatcagttcctgcagctgagcaccagcctgcctagccagtatatcacaggcctggcagagcacctgtctccactgatgctgagcacatcctggaccagaatcaccctgtggaacagagacctggctcccacacctggggccaacctgtatggctctcaccccttctatctggccctggaagatggtggttcagcccatggtgtctttctgctgaactccaatgccatggatgtggtgctgcagccctctcctgctctgtcttggagaagcactggtggcatcctggatgtgtacatctttctgggccctgagcctaagtctgtggtgcagcagtacctggatgttgtgggctaccccttcatgcctccttattggggcctgggcttccacctgtgcagatggggatacagcagcacagccatcaccagacaggttgtggaaaacatgaccagagcacacttcccactggatgtgcagtggaatgacctggactacatggacagcagaagggacttcaccttcaacaaggatggcttcagagacttccctgccatggtgcaagagctgcaccaagggggcagaagatatatgatgattgtggacccagccatcagctcctctggaccagctggcagctacagaccctatgatgagggactgagaagaggggtgttcatcaccaatgagacaggccagcctctgattggcaaagtgtggccaggctccacagcctttccagatttcacaaaccccacagctctggcttggtgggaagatatggtggcagagttccatgatcaggtgccctttgatggcatgtggattgacatgaatgagcccagcaacttcatcaggggctctgaggatggatgccccaacaatgaactggaaaatcctccttatgtgcctggtgttgttggagggacactgcaggcagccacaatttgtgccagctctcaccagtttctgagcacccactacaacctgcacaatctgtatggcctgactgaggccattgccagccacagggctcttgtgaaggctagaggcaccagaccttttgtgatcagcaggtccacctttgctggccatggcagatatgctggccactggactggggatgtgtggtctagttgggagcagctggctagctctgtgcctgagatcctgcagttcaacctgctgggagtgccccttgttggagcagatgtgtgtggcttcctgggcaacacctcagaggaactgtgtgtcagatggactcagctgggagcattctaccctttcatgagaaaccacaacagcctgctgagcctgcctcaagagccttacagcttttctgagccagcacagcaggccatgagaaaggccctgactctgagatatgccctgctgcctcacctgtacaccctgttccatcaggctcatgtggctggggagactgtggctagacccctgttcctggaattccccaaggacagctccacctggacagtggatcatcagctgctgtggggagaagccctgctgattacacctgtgctgcaggctggcaaggctgaagtgacaggctacttccctcttggcacttggtatgacctgcagacagtgcctgtggaagctctgggatctctgcctccacctcctgctgctcctagagagcctgccattcactctgaaggccagtgggttaccctgcctgctccactggataccatcaatgtgcatctgagagcaggctacatcatccctctgcaaggccctggcctgaccaccacagaatctagacagcagccaatggcactggctgtggccctgaccaaagggggagaagctagaggggagctgttctgggatgatggggagagcctggaagtgctggaaagaggggcctatacacaagtgatttttctggctaggaacaataccattgtgaatgagcttgtcagagtcacctctgaaggtgctggcctgcagctccagaaagtgacagtgcttggagtggccacagcaccccagcaagtgctgtctaatggggtgccagtgtccaacttcacatacagccctgataccaaggtcctggacatctgtgtgtccctgcttatgggagagcagttcctggtgtcttggtgc

SEQ ID NO: 853 - protein, 1137 aa, synthetic construct; identical to SEQ ID NO: 691

SEQ ID NO: 854 - DNA, 45 bp, synthetic construct
  source 1..45: mol_type = other DNA
gggggctcaggaggaggtggctcaggaggtggaggttcaggaggg

SEQ ID NO: 855 - DNA, 15 bp, synthetic construct
  source 1..15: mol_type = other DNA
gggggtggtggctct

SEQ ID NO: 856 - DNA, 2649 bp, synthetic construct
  source 1..2649: mol_type = other DNA
gcccatcctggcagacctagagctgtgcccacacagtgtgatgtgcctccaaacagcagatttgactgtgcccctgacaaggccatcacacaagagcagtgtgaagccagaggctgctgttacatccctgccaagcaaggactgcaaggggctcagatgggacagccctggtgcttcttcccaccatcttaccccagctacaagctggaaaacctgagcagctctgagatgggctacactgctacactgaccagaaccacacctacattcttcccaaaggacatcctgacactgaggctggatgtgatgatggaaacagagaacaggctgcacttcaccatcaaggaccctgccaatagaagatatgaggtgcccctggaaacccctcatgtgcactctagagccccatctccactgtactctgtggaattttctgaggaaccctttggggtcatagtcagaaggcagctggatggcagagtgctgctgaacacaactgtggcccctctgttctttgctgatcagttcctgcagctgagcaccagcctgcctagccagtatatcacaggcctggcagagcacctgtctccactgatgctgagcacatcctggaccagaatcaccctgtggaacagagacctggctcccacacctggggccaacctgtatggctctcaccccttctatctggccctggaagatggtggttcagcccatggtgtctttctgctgaactccaatgccatggatgtggtgctgcagccctctcctgctctgtcttggagaagcactggtggcatcctggatgtgtacatctttctgggccctgagcctaagtctgtggtgcagcagtacctggatgttgtgggctaccccttcatgcctccttattggggcctgggcttccacctgtgcagatggggatacagcagcacagccatcaccagacaggttgtggaaaacatgaccagagcacacttcccactggatgtgcagtggaatgacctggactacatggacagcagaagggacttcaccttcaacaaggatggcttcagagacttccctgccatggtgcaagagctgcaccaaggtggtagaagatatatgatgattgtggacccagccatcagctcctctggaccagctggcagctacagaccctatgatgagggactgagaagaggggtgttcatcaccaatgagacaggccagcctctgattggcaaagtgtggccaggctccacagcctttccagatttcacaaaccccacagctctggcttggtgggaagatatggtggcagagttccatgatcaggtgccctttgatggcatgtggattgacatgaatgagcccagcaacttcatcaggggctctgaggatggatgccccaacaatgaactggaaaatcctccttatgtgcctggtgttgttggagggacactgcaggcagccacaatttgtgccagctctcaccagtttctgagcacccactacaacctgcacaatctgtatggcctgactgaggccattgccagccacagggctcttgtgaaggctagaggcaccagaccttttgtgatcagcaggtccacctttgctggccatggcagatatgctggccactggactggggatgtgtggtctagttgggagcagctggctagctctgtgcctgagatcctgcagttcaacctgctgggagtgccccttgttggagcagatgtgtgtggcttcctgggcaacacctcagaggaactgtgtgtcagatggactcagctgggagcattctaccctttcatgagaaaccacaacagcctgctgagcctgcctcaagagccttacagcttttctgagccagcacagcaggccatgagaaaggccctgactctgagatatgccctgctgcctcacctgtacaccctgttccatcaggctcatgtggctggggagactgtggctagacccctgttcctggaattccccaaggacagctccacctggacagtggatcatcagctgctgtggggagaagccctgctgattacacctgtgctgcaggctggcaaggctgaagtgacaggctacttccctcttggcacttggtatgacctgcagacagtgcctgtggaagctctgggatctctgcctccacctcctgctgctcctagagagcctgccattcactctgaaggccagtgggttaccctgcctgctccactggataccatcaatgtgcatctgagagcaggctacatcatccctctgcaaggccctggcctgaccaccacagaatctagacagcagccaatggcactggctgtggccctgaccaaagggggagaagctagaggggagctgttctgggatgatggggagagcctggaagtgctggaaagaggggcctatacacaagtgatttttctggctaggaacaataccattgtgaatgagcttgtcagagtcacctctgaaggtgctggcctgcagctccagaaagtgacagtgcttggagtggccacagcaccccagcaagtgctgtctaatggggtgccagtgtccaacttcacatacagccctgataccaaggtcctggacatctgtgtgtccctgcttatgggagagcagttcctggtgtcttggtgc

SEQ ID NO: 857 - DNA, 2649 bp, synthetic construct
  source 1..2649: mol_type = other DNA
gcccatcctggcagacctagagctgtgcccacacagtgtgatgtgcctccaaacagcagatttgactgtgcccctgacaaggccatcacacaagagcagtgtgaagccagaggctgctgttacatccctgccaagcaaggactgcaaggggctcagatgggacagccctggtgcttcttcccaccatcttaccccagctacaagctggaaaacctgagcagctctgagatgggctacactgctacactgaccagaaccacacctacattcttcccaaaggacatcctgacactgaggctggatgtgatgatggaaacagagaacaggctgcacttcaccatcaaggaccctgccaatagaagatatgaggtgcccctggaaacccctcatgtgcactctagagccccatctccactgtactctgtggaattttctgaggaaccctttggggtcatagtcagaaggcagctggatggcagagtgctgctgaacacaactgtggcccctctgttctttgctgatcagttcctgcagctgagcaccagcctgcctagccagtatatcacaggcctggcagagcacctgtctccactgatgctgagcacatcctggaccagaatcaccctgtggaacagagacctggctcccacacctggggccaacctgtatggctctcaccccttctatctggccctggaagatggtggttcagcccatggtgtctttctgctgaactccaatgccatggatgtggtgctgcagccctctcctgctctgtcttggagaagcactggtggcatcctggatgtgtacatctttctgggccctgagcctaagtctgtggtgcagcagtacctggatgttgtgggctaccccttcatgcctccttattggggcctgggcttccacctgtgcagatggggatacagcagcacagccatcaccagacaggttgtggaaaacatgaccagagcacacttcccactggatgtgcagtggaatgacctggactacatggacagcagaagggacttcaccttcaacaaggatggcttcagagacttccctgccatggtgcaagagctgcaccaagggggcagaagatatatgatgattgtggacccagccatcagctcctctggaccagctggcagctacagaccctatgatgagggactgagaagaggggtgttcatcaccaatgagacaggccagcctctgattggcaaagtgtggccaggctccacagcctttccagatttcacaaaccccacagctctggcttggtgggaagatatggtggcagagttccatgatcaggtgccctttgatggcatgtggattgacatgaatgagcccagcaacttcatcaggggctctgaggatggatgccccaacaatgaactggaaaatcctccttatgtgcctggtgttgttggagggacactgcaggcagccacaatttgtgccagctctcaccagtttctgagcacccactacaacctgcacaatctgtatggcctgactgaggccattgccagccacagggctcttgtgaaggctagaggcaccagaccttttgtgatcagcaggtccacctttgctggccatggcagatatgctggccactggactggggatgtgtggtctagttgggagcagctggctagctctgtgcctgagatcctgcagttcaacctgctgggagtgccccttgttggagcagatgtgtgtggcttcctgggcaacacctcagaggaactgtgtgtcagatggactcagctgggagcattctaccctttcatgagaaaccacaacagcctgctgagcctgcctcaagagccttacagcttttctgagccagcacagcaggccatgagaaaggccctgactctgagatatgccctgctgcctcacctgtacaccctgttccatcaggctcatgtggctggggagactgtggctagacccctgttcctggaattccccaaggacagctccacctggacagtggatcatcagctgctgtggggagaagccctgctgattacacctgtgctgcaggctggcaaggctgaagtgacaggctacttccctcttggcacttggtatgacctgcagacagtgcctgtggaagctctgggatctctgcctccacctcctgctgctcctagagagcctgccattcactctgaaggccagtgggttaccctgcctgctccactggataccatcaatgtgcatctgagagcaggctacatcatccctctgcaaggccctggcctgaccaccacagaatctagacagcagccaatggcactggctgtggccctgaccaaagggggagaagctagaggggagctgttctgggatgatggggagagcctggaagtgctggaaagaggggcctatacacaagtgatttttctggctaggaacaataccattgtgaatgagcttgtcagagtcacctctgaaggtgctggcctgcagctccagaaagtgacagtgcttggagtggccacagcaccccagcaagtgctgtctaatggggtgccagtgtccaacttcacatacagccctgataccaaggtcctggacatctgtgtgtccctgcttatgggagagcagttcctggtgtcttggtgc

SEQ ID NO: 858 - DNA, 276 bp, synthetic construct
  source 1..276: mol_type = other DNA
cctctactgtgccttctagttgccagccatctgttgtttgcccctcccccttgccttccttgaccctggaaggtgccactcccactgtcctttcctaataaaatgaggaaattgcatcacattgtctgagtaggtgtcattctattctggggggtggggtggggcaggacagcaagggggaggattgggaagacaatagcaggcatgctggggatgcagtgggctctatggcttctgaggtggaaagaaccagctggggctctagggggtatcccc

SEQ ID NO: 859 - DNA, 227 bp, synthetic construct
  source 1..227: mol_type = other DNA
gacatgataagatacattgatgagtttggacaaaccacaactagaatgcagtgaaaaaaatgcttgatttgtgaaatttgtgatgctattgcttgatttgtaaccattataagctgcaataaacaagttaacaacaacaattgcattcattttatgtttcaggttcagggggaggtgtgggaggttttttaaagcaagtaaaacctctacaaatgtggtatggctga

SEQ ID NO: 860 - DNA, 49 bp, synthetic construct
  source 1..49: mol_type = other DNA
aataaaagatctttattttcattagatctgtgtgttggttttttgtgtg

SEQ ID NO: 861 - DNA, 600 bp, synthetic construct
  source 1..600: mol_type = other DNA
aatgtaatagtcacggacattattatcggtctgggatgtcatagtagcttaacggtagcgtgttggaacggtattcggtcacacaaccatgcgacacgtttaagttctgatacagtgcaaagggcttctcatccaattggtctacctgaagactatggtagacatctatgctgccaagttgattttggggtacagtaactgtctaaactagaagatcttttttctaaccagcggcaaaccggttcaggtaaatggtacccgatccgcttgctgctggcgtggccaccgtaaggtgttgtacttgaattggctgaatgacgaatgtgacacggcgagcatctccgattggaggggacacggtgcggcacctacggggtctgaaatttggaccacgatggactctctcgaatgcagacgctcttaatacccaaagatcacggcacgcgacgcttaacttaggttggccatgagtaacttcgcggtctggcggcgccggggttgtcatggttccgtcctgcgatactttcttcaaaagtgtcagccattcgttccacactagctcgatcccacaaccaaagatatagggagggtgattcggac

SEQ ID NO: 862 - DNA, 31 bp, synthetic construct
  source 1..31: mol_type = other DNA
ctggccttgggggagggggaggccagaatga

SEQ ID NO: 863 - DNA, 3384 bp, synthetic construct
  source 1..3384: mol_type = other DNA
caagtccagctgcaagagtctggccccaaggtggtcaagccctctgagacactgagcctgacctgcacagtgtctggtggcagcatcagcagctactactggaactggatcagacagagccctggcaaaggactggaatggattggctacaccaagagaggctacacagactacaaccccagcctgagaagcagagtgaccatctctgaggacaccagcaagaaccagttcagcctgaggatcagctctgtgacagctgctgacacagcagtttactactgtgcccagatgggctggggcagccatgcctttgatatgtggggccagggcacaatggtggctgtgtccagtgggggctcaggaggaggtggctcaggaggtggaggttcaggaggggagattgtgctgacccagtctcctggcacactgtctctgagccctggggaaagagccacactgagctgtagagccagccagtctgtgtcctctagctacctggcctggtatcagcagaagcctggacaggctcccagactgctgatctatggggcctcttctagagccacaggcatccctgacagattcagtggcagtggctctggcacagacttcaccctgaccatcagcagactggaacctgaggactttgctgtgtactattgccagcagtatggcagcagcccctggacatttggacagggcaccaaggtggaaatcaaagggggtggtggctctgcccatcctggcagacctagagctgtgcccacacagtgtgatgtgcctccaaacagcagatttgactgtgcccctgacaaggccatcacacaagagcagtgtgaagccagaggctgctgttacatccctgccaagcaaggactgcaaggggctcagatgggacagccctggtgcttcttcccaccatcttaccccagctacaagctggaaaacctgagcagctctgagatgggctacactgctacactgaccagaaccacacctacattcttcccaaaggacatcctgacactgaggctggatgtgatgatggaaacagagaacaggctgcacttcaccatcaaggaccctgccaatagaagatatgaggtgcccctggaaacccctcatgtgcactctagagccccatctccactgtactctgtggaattttctgaggaaccctttggggtcatagtcagaaggcagctggatggcagagtgctgctgaacacaactgtggcccctctgttctttgctgatcagttcctgcagctgagcaccagcctgcctagccagtatatcacaggcctggcagagcacctgtctccactgatgctgagcacatcctggaccagaatcaccctgtggaacagagacctggctcccacacctggggccaacctgtatggctctcaccccttctatctggccctggaagatggtggttcagcccatggtgtctttctgctgaactccaatgccatggatgtggtgctgcagccctctcctgctctgtcttggagaagcactggtggcatcctggatgtgtacatctttctgggccctgagcctaagtctgtggtgcagcagtacctggatgttgtgggctaccccttcatgcctccttattggggcctgggcttccacctgtgcagatggggatacagcagcacagccatcaccagacaggttgtggaaaacatgaccagagcacacttcccactggatgtgcagtggaatgacctggactacatggacagcagaagggacttcaccttcaacaaggatggcttcagagacttccctgccatggtgcaagagctgcaccaagggggcagaagatatatgatgattgtggacccagccatcagctcctctggaccagctggcagctacagaccctatgatgagggactgagaagaggggtgttcatcaccaatgagacaggccagcctctgattggcaaagtgtggccaggctccacagcctttccagatttcacaaaccccacagctctggcttggtgggaagatatggtggcagagttccatgatcaggtgccctttgatggcatgtggattgacatgaatgagcccagcaacttcatcaggggctctgaggatggatgccccaacaatgaactggaaaatcctccttatgtgcctggtgttgttggagggacactgcaggcagccacaatttgtgccagctctcaccagtttctgagcacccactacaacctgcacaatctgtatggcctgactgaggccattgccagccacagggctcttgtgaaggctagaggcaccagaccttttgtgatcagcaggtccacctttgctggccatggcagatatgctggccactggactggggatgtgtggtctagttgggagcagctggctagctctgtgcctgagatcctgcagttcaacctgctgggagtgccccttgttggagcagatgtgtgtggcttcctgggcaacacctcagaggaactgtgtgtcagatggactcagctgggagcattctaccctttcatgagaaaccacaacagcctgctgagcctgcctcaagagccttacagcttttctgagccagcacagcaggccatgagaaaggccctgactctgagatatgccctgctgcctcacctgtacaccctgttccatcaggctcatgtggctggggagactgtggctagacccctgttcctggaattccccaaggacagctccacctggacagtggatcatcagctgctgtggggagaagccctgctgattacacctgtgctgcaggctggcaaggctgaagtgacaggctacttccctcttggcacttggtatgacctgcagacagtgcctgtggaagctctgggatctctgcctccacctcctgctgctcctagagagcctgccattcactctgaaggccagtgggttaccctgcctgctccactggataccatcaatgtgcatctgagagcaggctacatcatccctctgcaaggccctggcctgaccaccacagaatctagacagcagccaatggcactggctgtggccctgaccaaagggggagaagctagaggggagctgttctgggatgatggggagagcctggaagtgctggaaagaggggcctatacacaagtgatttttctggctaggaacaataccattgtgaatgagcttgtcagagtcacctctgaaggtgctggcctgcagctccagaaagtgacagtgcttggagtggccacagcaccccagcaagtgctgtctaatggggtgccagtgtccaacttcacatacagccctgataccaaggtcctggacatctgtgtgtccctgcttatgggagagcagttcctggtgtcttggtgc

SEQ ID NO: 864 - DNA, 3384 bp, synthetic construct
  source 1..3384: mol_type = other DNA
caggtccagctgcaagagtctggccccaaggtggtcaagccctctgagacactgagcctgacctgcacagtgtctggtggcagcatcagcagctactactggaactggatcagacagagccctggcaaaggcctggaatggattggctacaccaagagaggctacacagactacaaccccagcctgagaagcagagtgaccatctctgaggacaccagcaagaaccagttcagcctgaggatcagctctgtgacagctgctgacacagcagtttactactgtgcccagatgggctggggcagccatgcctttgatatgtggggccagggcacaatggtggctgtgtccagtgggggctcaggaggaggtggctcaggaggtggaggttcaggaggggagattgtgctgacccagtctcctggcacactgtctctgagccctggggaaagagccacactgagctgtagagccagccagtctgtgtcctctagctacctggcctggtatcagcagaagcctggacaggctcccagactgctgatctatggggcctcttctagagccacaggcatccctgacagattcagtggcagtggctctggcacagacttcaccctgaccatcagcagactggaacctgaggactttgctgtgtactattgccagcagtatggcagcagcccctggacatttggacagggcaccaaggtggaaatcaaagggggtggtggctctgcccatcctggcagacctagagctgtgcccacacagtgtgatgtgcctccaaacagcagatttgactgtgcccctgacaaggccatcacacaagagcagtgtgaagccagaggctgctgttacatccctgccaagcaaggactgcaaggggctcagatgggacagccctggtgcttcttcccaccatcttaccccagctacaagctggaaaacctgagcagctctgagatgggctacactgctacactgaccagaaccacacctacattcttcccaaaggacatcctgacactgaggctggatgtgatgatggaaacagagaacaggctgcacttcaccatcaaggaccctgccaatagaagatatgaggtgcccctggaaacccctcatgtgcactctagagccccatctccactgtactctgtggaattttctgaggaaccctttggggtcatagtcagaaggcagctggatggcagagtgctgctgaacacaactgtggcccctctgttctttgctgatcagttcctgcagctgagcaccagcctgcctagccagtatatcacaggcctggcagagcacctgtctccactgatgctgagcacatcctggaccagaatcaccctgtggaacagagacctggctcccacacctggggccaacctgtatggctctcaccccttctatctggccctggaagatggtggttcagcccatggtgtctttctgctgaactccaatgccatggatgtggtgctgcagccctctcctgctctgtcttggagaagcactggtggcatcctggatgtgtacatctttctgggccctgagcctaagtctgtggtgcagcagtacctggatgttgtgggctaccccttcatgcctccttattggggcctgggcttccacctgtgcagatggggatacagcagcacagccatcaccagacaggttgtggaaaacatgaccagagcacacttcccactggatgtgcagtggaatgacctggactacatggacagcagaagggacttcaccttcaacaaggatggcttcagagacttccctgccatggtgcaagagctgcaccaagggggcagaagatatatgatgattgtggacccagccatcagctcctctggaccagctggcagctacagaccctatgatgagggactgagaagaggggtgttcatcaccaatgagacaggccagcctctgattggcaaagtgtggccaggctccacagcctttccagatttcacaaaccccacagctctggcttggtgggaagatatggtggcagagttccatgatcaggtgccctttgatggcatgtggattgacatgaatgagcccagcaacttcatcaggggctctgaggatggatgccccaacaatgaactggaaaatcctccttatgtgcctggtgttgttggagggacactgcaggcagccacaatttgtgccagctctcaccagtttctgagcacccactacaacctgcacaatctgtatggcctgactgaggccattgccagccacagggctcttgtgaaggctagaggcaccagaccttttgtgatcagcaggtccacctttgctggccatggcagatatgctggccactggactggggatgtgtggtctagttgggagcagctggctagctctgtgcctgagatcctgcagttcaacctgctgggagtgccccttgttggagcagatgtgtgtggcttcctgggcaacacctcagaggaactgtgtgtcagatggactcagctgggagcattctaccctttcatgagaaaccacaacagcctgctgagcctgcctcaagagccttacagcttttctgagccagcacagcaggccatgagaaaggccctgactctgagatatgccctgctgcctcacctgtacaccctgttccatcaggctcatgtggctggggagactgtggctagacccctgttcctggaattccccaaggacagctccacctggacagtggatcatcagctgctgtggggagaagccctgctgattacacctgtgctgcaggctggcaaggctgaagtgacaggctacttccctcttggcacttggtatgacctgcagacagtgcctgtggaagctctgggatctctgcctccacctcctgctgctcctagagagcctgccattcactctgaaggccagtgggttaccctgcctgctccactggataccatcaatgtgcatctgagagcaggctacatcatccctctgcaaggccctggcctgaccaccacagaatctagacagcagccaatggcactggctgtggccctgaccaaagggggagaagctagaggggagctgttctgggatgatggggagagcctggaagtgctggaaagaggggcctatacacaagtgatttttctggctaggaacaataccattgtgaatgagcttgtcagagtcacctctgaaggtgctggcctgcagctccagaaagtgacagtgcttggagtggccacagcaccccagcaagtgctgtctaatggggtgccagtgtccaacttcacatacagccctgataccaaggtcctggacatctgtgtgtccctgcttatgggagagcagttcctggtgtcttggtgc

SEQ ID NO: 865 - DNA, 3384 bp, synthetic construct
  source 1..3384: mol_type = other DNA
caggtccagctgcaagagtctggccccaaggtggtcaagccctctgagacactgagcctgacctgcacagtgtctggtggcagcatcagcagctactactggaactggatcagacagagccctggcaaaggcctggaatggattggctacaccaagagaggctacacagactacaaccccagcctgagaagcagagtgaccatctctgaggacaccagcaagaaccagttcagcctgaggatcagctctgtgacagctgctgacacagcagtgtactactgtgcccagatgggctggggcagccatgcctttgatatgtggggccagggcacaatggtggctgtgtccagtgggggctcaggaggaggtggctcaggaggtggaggttcaggaggggagattgtgctgacccagtctcctggcacactgtctctgagccctggggaaagagccacactgagctgtagagccagccagtctgtgtcctctagctacctggcctggtatcagcagaagcctggacaggctcccagactgctgatctatggggcctcttctagagccacaggcatccctgacagattcagtggcagtggctctggcacagacttcaccctgaccatcagcagactggaacctgaggactttgctgtgtactattgccagcagtatggcagcagcccctggacatttggacagggcaccaaggtggaaatcaaaggtggtggtggctctgcccatcctggcagacctagagctgtgcccacacagtgtgatgtgcctccaaacagcagatttgactgtgcccctgacaaggccatcacacaagagcagtgtgaagccagaggctgctgttacatccctgccaagcaaggactgcaaggggctcagatgggacagccctggtgcttcttcccaccatcttaccccagctacaagctggaaaacctgagcagctctgagatgggctacactgctacactgaccagaaccacacctacattcttcccaaaggacatcctgacactgaggctggatgtgatgatggaaacagagaacaggctgcacttcaccatcaaggaccctgccaatagaagatatgaggtgcccctggaaacccctcatgtgcactctagagccccatctccactgtactctgtggaattttctgaggaaccctttggggtcatagtcagaaggcagctggatggcagagtgctgctgaacacaactgtggcccctctgttctttgctgatcagttcctgcagctgagcaccagcctgcctagccagtatatcacaggcctggcagagcacctgtctccactgatgctgagcacatcctggaccagaatcaccctgtggaacagagacctggctcccacacctggggccaacctgtatggctctcaccccttctatctggccctggaagatggtggttcagcccatggtgtctttctgctgaactccaatgccatggatgtggtgctgcagccctctcctgctctgtcttggagaagcactggtggcatcctggatgtgtacatctttctgggccctgagcctaagtctgtggtgcagcagtacctggatgttgtgggctaccccttcatgcctccttattggggcctgggcttccacctgtgcagatggggatacagcagcacagccatcaccagacaggttgtggaaaacatgaccagagcacacttcccactggatgtgcagtggaatgacctggactacatggacagcagaagggacttcaccttcaacaaggatggcttcagagacttccctgccatggtgcaagagctgcaccaaggtggtagaagatatatgatgattgtggacccagccatcagctcctctggaccagctggcagctacagaccctatgatgagggactgagaagaggggtgttcatcaccaatgagacaggccagcctctgattggcaaagtgtggccaggctccacagcctttccagatttcacaaaccccacagctctggcttggtgggaagatatggtggcagagttccatgatcaggtgccctttgatggcatgtggattgacatgaatgagcccagcaacttcatcaggggctctgaggatggatgccccaacaatgaactggaaaatcctccttatgtgcctggtgttgttggagggacactgcaggcagccacaatttgtgccagctctcaccagtttctgagcacccactacaacctgcacaatctgtatggcctgactgaggccattgccagccacagggctcttgtgaaggctagaggcaccagaccttttgtgatcagcaggtccacctttgctggccatggcagatatgctggccactggactggggatgtgtggtctagttgggagcagctggctagctctgtgcctgagatcctgcagttcaacctgctgggagtgccccttgttggagcagatgtgtgtggcttcctgggcaacacctcagaggaactgtgtgtcagatggactcagctgggagcattctaccctttcatgagaaaccacaacagcctgctgagcctgcctcaagagccttacagcttttctgagccagcacagcaggccatgagaaaggccctgactctgagatatgccctgctgcctcacctgtacaccctgttccatcaggctcatgtggctggggagactgtggctagacccctgttcctggaattccccaaggacagctccacctggacagtggatcatcagctgctgtggggagaagccctgctgattacacctgtgctgcaggctggcaaggctgaagtgacaggctacttccctcttggcacttggtatgacctgcagacagtgcctgtggaagctctgggatctctgcctccacctcctgctgctcctagagagcctgccattcactctgaaggccagtgggttaccctgcctgctccactggataccatcaatgtgcatctgagagcaggctacatcatccctctgcaaggccctggcctgaccaccacagaatctagacagcagccaatggcactggctgtggccctgaccaaagggggagaagctagaggggagctgttctgggatgatggggagagcctggaagtgctggaaagaggggcctatacacaagtgatttttctggctaggaacaataccattgtgaatgagcttgtcagagtcacctctgaaggtgctggcctgcagctccagaaagtgacagtgcttggagtggccacagcaccccagcaagtgctgtctaatggggtgccagtgtccaacttcacatacagccctgataccaaggtcctggacatctgtgtgtccctgcttatgggagagcagttcctggtgtcttggtgc

SEQ ID NO: 866 - DNA, 720 bp, synthetic construct
  source 1..720: mol_type = other DNA
caagtccagctgcaagagtctggccccaaggtggtcaagccctctgagacactgagcctgacctgcacagtgtctggtggcagcatcagcagctactactggaactggatcagacagagccctggcaaaggactggaatggattggctacaccaagagaggctacacagactacaaccccagcctgagaagcagagtgaccatctctgaggacaccagcaagaaccagttcagcctgaggatcagctctgtgacagctgctgacacagcagtttactactgtgcccagatgggctggggcagccatgcctttgatatgtggggccagggcacaatggtggctgtgtccagtgggggctcaggaggaggtggctcaggaggtggaggttcaggaggggagattgtgctgacccagtctcctggcacactgtctctgagccctggggaaagagccacactgagctgtagagccagccagtctgtgtcctctagctacctggcctggtatcagcagaagcctggacaggctcccagactgctgatctatggggcctcttctagagccacaggcatccctgacagattcagtggcagtggctctggcacagacttcaccctgaccatcagcagactggaacctgaggactttgctgtgtactattgccagcagtatggcagcagcccctggacatttggacagggcaccaaggtggaaatcaaa

SEQ ID NO: 867 - DNA, 720 bp, synthetic construct
  source 1..720: mol_type = other DNA
caggtccagctgcaagagtctggccccaaggtggtcaagccctctgagacactgagcctgacctgcacagtgtctggtggcagcatcagcagctactactggaactggatcagacagagccctggcaaaggcctggaatggattggctacaccaagagaggctacacagactacaaccccagcctgagaagcagagtgaccatctctgaggacaccagcaagaaccagttcagcctgaggatcagctctgtgacagctgctgacacagcagtttactactgtgcccagatgggctggggcagccatgcctttgatatgtggggccagggcacaatggtggctgtgtccagtgggggctcaggaggaggtggctcaggaggtggaggttcaggaggggagattgtgctgacccagtctcctggcacactgtctctgagccctggggaaagagccacactgagctgtagagccagccagtctgtgtcctctagctacctggcctggtatcagcagaagcctggacaggctcccagactgctgatctatggggcctcttctagagccacaggcatccctgacagattcagtggcagtggctctggcacagacttcaccctgaccatcagcagactggaacctgaggactttgctgtgtactattgccagcagtatggcagcagcccctggacatttggacagggcaccaaggtggaaatcaaa

SEQ ID NO: 868 - protein, 117 aa, synthetic construct
QVQLQESGPKVVKPSETLSLTCTVSGGSISSYYWNWIRQSPGKGLEWIGYTKRGYTDYNPSLRSRVTISEDTSKNQFSLRISSVTAADTAVYYCAQMGWGSHAFDMWGQGTMVAVSS

SEQ ID NO: 869 - protein, 108 aa, synthetic construct; identical to SEQ ID NO: 570

SEQ ID NO: 870 - DNA, 4020 bp, synthetic construct; identical to SEQ ID NO: 848
  source 1..4020: mol_type = other DNA
  misc_feature 1..130: note = 130 bp AAV2 ITR-L
  misc_feature 139..238: note = mAlb SA
  misc_feature 241..564: note = H1H12847VK
  misc_feature 565..609: note = 3X G4S
  misc_feature 610..972: note = H1H112847VH
  misc_feature 973..1002: note = 2X G4S
  misc_feature 1003..3651: note = GAA
  misc_feature 3658..3884: note = SV40 polyA
  misc_feature 3891..4020: note = 130 bp AAV2 ITR-R

SEQ ID NO: 871 - DNA, 4297 bp, synthetic construct
  source 1..4297: mol_type = other DNA
  misc_feature 1..130: note = 130_bp_AAV2_ITR_-_Left
  misc_feature 139..238: note = mAlb_SA
  misc_feature 241..564: note = H1H12847 VK
  misc_feature 565..609: note = 3xG4S
  misc_feature 610..972: note = H1H12847 VH
  misc_feature 973..1002: note = 2xG4S
  misc_feature 1003..3651: note = GAA (70-952)
  misc_feature 3658..3933: note = bGHpA
  misc_feature 3935..4161: note = SV40_late_polyA
  misc_feature 4168..4297: note = 130_bp_AAV2_ITR_-_R
ctgcgcgctcgctcgctcactgaggccgcccgggcaaagcccgggcgtcgggcgacctttggtcgcccggcctcagtgagcgagcgagcgcgcagagagggagtggccaactccatcactaggggttcctagatctcttaggtcagtgaagagaagaacaaaaagcagcatattacagttagttgtcttcatcaatctttaaatatgttgtgtggtttttctctccctgtttccacagttgacatccagatgacccagagccccagctccctgtcagccagtgtgggtgacagagtgaccatcacctgcagagccagccagagcatcagcagctacctgaactggtaccagcagaaacctggcaaagcccccaagctgctgatttatgctgctagcagcctgcagagtggagtgcccagcagattctcaggcagtggctctggcacagacttcaccctgaccatctccagcctgcagccagaagactttgccacctactactgccagcagagctacagcacccctcctatcacctttggccagggcacaagactggagatcaagggaggaggaggctctggaggaggaggctctggagggggaggctctgaggtccaactggttgaatctggagggggcctggtgcaacctggcaggagcctgagactgagctgtgctgcctctggcttcacctttgatgactatgccatgaactgggtgagacaggcccctggcaagggcctggagtgggtgtctggcatcagctggagctctggcagcatggactatgcagattctgtgaagggcaggttcaccatcagcagagataatgccaagaacagcctgtacctgcagatgaacagcctcaggacagaggacacagccctgtactactgtgccaaggccagagaagtgggtgactactatggcatggatgtgtggggccagggcaccacagtgacagtgagctctgggggaggaggctcaggtgggggtggcagtgcccatcctggcagacctagagctgtgcccacacagtgtgatgtgcctccaaacagcagatttgactgtgcccctgacaaggccatcacacaagagcagtgtgaagccagaggctgctgttacatccctgccaagcaaggactgcaaggggctcagatgggacagccctggtgcttcttcccaccatcttaccccagctacaagctggaaaacctgagcagctctgagatgggctacactgctacactgaccagaaccacacctacattcttcccaaaggacatcctgacactgaggctggatgtgatgatggaaacagagaacaggctgcacttcaccatcaaggaccctgccaatagaagatatgaggtgcccctggaaacccctcatgtgcactctagagccccatctccactgtactctgtggaattttctgaggaaccctttggggtcatagtcagaaggcagctggatggcagagtgctgctgaacacaactgtggcccctctgttctttgctgatcagttcctgcagctgagcaccagcctgcctagccagtatatcacaggcctggcagagcacctgtctccactgatgctgagcacatcctggaccagaatcaccctgtggaacagagacctggctcccacacctggggccaacctgtatggctctcaccccttctatctggccctggaagatggtggttcagcccatggtgtctttctgctgaactccaatgccatggatgtggtgctgcagccctctcctgctctgtcttggagaagcactggtggcatcctggatgtgtacatctttctgggccctgagcctaagtctgtggtgcagcagtacctggatgttgtgggctaccccttcatgcctccttattggggcctgggcttccacctgtgcagatggggatacagcagcacagccatcaccagacaggttgtggaaaacatgaccagagcacacttcccactggatgtgcagtggaatgacctggactacatggacagcagaagggacttcaccttcaacaaggatggcttcagagacttccctgccatggtgcaagagctgcaccaagggggcagaagatatatgatgattgtggacccagccatcagctcctctggaccagctggcagctacagaccctatgatgagggactgagaagaggggtgttcatcaccaatgagacaggccagcctctgattggcaaagtgtggccaggctccacagcctttccagatttcacaaaccccacagctctggcttggtgggaagatatggtggcagagttccatgatcaggtgccctttgatggcatgtggattgacatgaatgagcccagcaacttcatcaggggctctgaggatggatgccccaacaatgaactggaaaatcctccttatgtgcctggtgttgttggagggacactgcaggcagccacaatttgtgccagctctcaccagtttctgagcacccactacaacctgcacaatctgtatggcctgactgaggccattgccagccacagggctcttgtgaaggctagaggcaccagaccttttgtgatcagcaggtccacctttgctggccatggcagatatgctggccactggactggggatgtgtggtctagttgggagcagctggctagctctgtgcctgagatcctgcagttcaacctgctgggagtgccccttgttggagcagatgtgtgtggcttcctgggcaacacctcagaggaactgtgtgtcagatggactcagctgggagcattctaccctttcatgagaaaccacaacagcctgctgagcctgcctcaagagccttacagcttttctgagccagcacagcaggccatgagaaaggccctgactctgagatatgccctgctgcctcacctgtacaccctgttccatcaggctcatgtggctggggagactgtggctagacccctgttcctggaattccccaaggacagctccacctggacagtggatcatcagctgctgtggggagaagccctgctgattacacctgtgctgcaggctggcaaggctgaagtgacaggctacttccctcttggcacttggtatgacctgcagacagtgcctgtggaagctctgggatctctgcctccacctcctgctgctcctagagagcctgccattcactctgaaggccagtgggttaccctgcctgctccactggataccatcaatgtgcatctgagagcaggctacatcatccctctgcaaggccctggcctgaccaccacagaatctagacagcagccaatggcactggctgtggccctgaccaaagggggagaagctagaggggagctgttctgggatgatggggagagcctggaagtgctggaaagaggggcctatacacaagtgatttttctggctaggaacaataccattgtgaatgagcttgtcagagtcacctctgaaggtgctggcctgcagctccagaaagtgacagtgcttggagtggccacagcaccccagcaagtgctgtctaatggggtgccagtgtccaacttcacatacagccctgataccaaggtcctggacatctgtgtgtccctgcttatgggagagcagttcctggtgtcttggtgctaataacctctactgtgccttctagttgccagccatctgttgtttgcccctcccccttgccttccttgaccctggaaggtgccactcccactgtcctttcctaataaaatgaggaaattgcatcacattgtctgagtaggtgtcattctattctggggggtggggtggggcaggacagcaagggggaggattgggaagacaatagcaggcatgctggggatgcagtgggctctatggcttctgaggtggaaagaaccagctggggctctagggggtatccccagacatgataagatacattgatgagtttggacaaaccacaactagaatgcagtgaaaaaaatgcttgatttgtgaaatttgtgatgctattgcttgatttgtaaccattataagctgcaataaacaagttaacaacaacaattgcattcattttatgtttcaggttcagggggaggtgtgggaggttttttaaagcaagtaaaacctctacaaatgtggtatggctgaagatctaggaacccctagtgatggagttggccactccctctctgcgcgctcgctcgctcactgaggccgggcgaccaaaggtcgcccgacgcccgggctttgcccgggcggcctcagtgagcgagcgagcgcgcag

SEQ ID NO: 872 - DNA, 4070 bp, synthetic construct
  source 1..4070: mol_type = other DNA
  misc_feature 1..130: note = 130_bp_AAV2_ITR_-_Left
  misc_feature 139..238: note = mAlb_SA
  misc_feature 241..564: note = H1H12847 VK
  misc_feature 565..609: note = 3xG4S
  misc_feature 610..972: note = H1H12847 VH
  misc_feature 973..1002: note = 2xG4S
  misc_feature 1003..3651: note = GAA (70-952)
  misc_feature 3658..3933: note = bGHpA
  misc_feature 3941..4070: note = 130_bp_AAV2_ITR_-_R
ctgcgcgctcgctcgctcactgaggccgcccgggcaaagcccgggcgtcgggcgacctttggtcgcccggcctcagtgagcgagcgagcgcgcagagagggagtggccaactccatcactaggggttcctagatctcttaggtcagtgaagagaagaacaaaaagcagcatattacagttagttgtcttcatcaatctttaaatatgttgtgtggtttttctctccctgtttccacagttgacatccagatgacccagagccccagctccctgtcagccagtgtgggtgacagagtgaccatcacctgcagagccagccagagcatcagcagctacctgaactggtaccagcagaaacctggcaaagcccccaagctgctgatttatgctgctagcagcctgcagagtggagtgcccagcagattctcaggcagtggctctggcacagacttcaccctgaccatctccagcctgcagccagaagactttgccacctactactgccagcagagctacagcacccctcctatcacctttggccagggcacaagactggagatcaagggaggaggaggctctggaggaggaggctctggagggggaggctctgaggtccaactggttgaatctggagggggcctggtgcaacctggcaggagcctgagactgagctgtgctgcctctggcttcacctttgatgactatgccatgaactgggtgagacaggcccctggcaagggcctggagtgggtgtctggcatcagctggagctctggcagcatggactatgcagattctgtgaagggcaggttcaccatcagcagagataatgccaagaacagcctgtacctgcagatgaacagcctcaggacagaggacacagccctgtactactgtgccaaggccagagaagtgggtgactactatggcatggatgtgtggggccagggcaccacagtgacagtgagctctgggggaggaggctcaggtgggggtggcagtgcccatcctggcagacctagagctgtgcccacacagtgtgatgtgcctccaaacagcagatttgactgtgcccctgacaaggccatcacacaagagcagtgtgaagccagaggctgctgttacatccctgccaagcaaggactgcaaggggctcagatgggacagccctggtgcttcttcccaccatcttaccccagctacaagctggaaaacctgagcagctctgagatgggctacactgctacactgaccagaaccacacctacattcttcccaaaggacatcctgacactgaggctggatgtgatgatggaaacagagaacaggctgcacttcaccatcaaggaccctgccaatagaagatatgaggtgcccctggaaacccctcatgtgcactctagagccccatctccactgtactctgtggaattttctgaggaaccctttggggtcatagtcagaaggcagctggatggcagagtgctgctgaacacaactgtggcccctctgttctttgctgatcagttcctgcagctgagcaccagcctgcctagccagtatatcacaggcctggcagagcacctgtctccactgatgctgagcacatcctggaccagaatcaccctgtggaacagagacctggctcccacacctggggccaacctgtatggctctcaccccttctatctggccctggaagatggtggttcagcccatggtgtctttctgctgaactccaatgccatggatgtggtgctgcagccctctcctgctctgtcttggagaagcactggtggcatcctggatgtgtacatctttctgggccctgagcctaagtctgtggtgcagcagtacctggatgttgtgggctaccccttcatgcctccttattggggcctgggcttccacctgtgcagatggggatacagcagcacagccatcaccagacaggttgtggaaaacatgaccagagcacacttcccactggatgtgcagtggaatgacctggactacatggacagcagaagggacttcaccttcaacaaggatggcttcagagacttccctgccatggtgcaagagctgcaccaagggggcagaagatatatgatgattgtggacccagccatcagctcctctggaccagctggcagctacagaccctatgatgagggactgagaagaggggtgttcatcaccaatgagacaggccagcctctgattggcaaagtgtggccaggctccacagcctttccagatttcacaaaccccacagctctggcttggtgggaagatatggtggcagagttccatgatcaggtgccctttgatggcatgtggattgacatgaatgagcccagcaacttcatcaggggctctgaggatggatgccccaacaatgaactggaaaatcctccttatgtgcctggtgttgttggagggacactgcaggcagccacaatttgtgccagctctcaccagtttctgagcacccactacaacctgcacaatctgtatggcctgactgaggccattgccagccacagggctcttgtgaaggctagaggcaccagaccttttgtgatcagcaggtccacctttgctggccatggcagatatgctggccactggactggggatgtgtggtctagttgggagcagctggctagctctgtgcctgagatcctgcagttcaacctgctgggagtgccccttgttggagcagatgtgtgtggcttcctgggcaacacctcagaggaactgtgtgtcagatggactcagctgggagcattctaccctttcatgagaaaccacaacagcctgctgagcctgcctcaagagccttacagcttttctgagccagcacagcaggccatgagaaaggccctgactctgagatatgccctgctgcctcacctgtacaccctgttccatcaggctcatgtggctggggagactgtggctagacccctgttcctggaattccccaaggacagctccacctggacagtggatcatcagctgctgtggggagaagccctgctgattacacctgtgctgcaggctggcaaggctgaagtgacaggctacttccctcttggcacttggtatgacctgcagacagtgcctgtggaagctctgggatctctgcctccacctcctgctgctcctagagagcctgccattcactctgaaggccagtgggttaccctgcctgctccactggataccatcaatgtgcatctgagagcaggctacatcatccctctgcaaggccctggcctgaccaccacagaatctagacagcagccaatggcactggctgtggccctgaccaaagggggagaagctagaggggagctgttctgggatgatggggagagcctggaagtgctggaaagaggggcctatacacaagtgatttttctggctaggaacaataccattgtgaatgagcttgtcagagtcacctctgaaggtgctggcctgcagctccagaaagtgacagtgcttggagtggccacagcaccccagcaagtgctgtctaatggggtgccagtgtccaacttcacatacagccctgataccaaggtcctggacatctgtgtgtccctgcttatgggagagcagttcctggtgtcttggtgctaataacctctactgtgccttctagttgccagccatctgttgtttgcccctcccccttgccttccttgaccctggaaggtgccactcccactgtcctttcctaataaaatgaggaaattgcatcacattgtctgagtaggtgtcattctattctggggggtggggtggggcaggacagcaagggggaggattgggaagacaatagcaggcatgctggggatgcagtgggctctatggcttctgaggtggaaagaaccagctggggctctagggggtatccccaagatctaggaacccctagtgatggagttggccactccctctctgcgcgctcgctcgctcactgaggccgggcgaccaaaggtcgcccgacgcccgggctttgcccgggcggcctcagtgagcgagcgagcgcgcag

SEQ ID NO: 873 - DNA, 4069 bp, synthetic construct
  source 1..4069: mol_type = other DNA
  misc_feature 1..130: note = 130_bp_AAV2_ITR_-_Left
  misc_feature 139..238: note = mAlb_SA
  misc_feature 241..564: note = H1H12847 VK
  misc_feature 565..609: note = 3xG4S
  misc_feature 610..972: note = H1H12847 VH
  misc_feature 973..1002: note = 2xG4S
  misc_feature 1003..3651: note = GAA (70-952)
  misc_feature 3658..3933: note = bGHpA
  misc_feature 3940..4069: note = 130_bp_AAV2_ITR_-_R
ctgcgcgctcgctcgctcactgaggccgcccgggcaaagcccgggcgtcgggcgacctttggtcgcccggcctcagtgagcgagcgagcgcgcagagagggagtggccaactccatcactaggggttcctagatctcttaggtcagtgaagagaagaacaaaaagcagcatattacagttagttgtcttcatcaatctttaaatatgttgtgtggtttttctctccctgtttccacagttgacatccagatgacccagagccccagctccctgtcagccagtgtgggtgacagagtgaccatcacctgcagagccagccagagcatcagcagctacctgaactggtaccagcagaaacctggcaaagcccccaagctgctgatttatgctgctagcagcctgcagagtggagtgcccagcagattctcaggcagtggctctggcacagacttcaccctgaccatctccagcctgcagccagaagactttgccacctactactgccagcagagctacagcacccctcctatcacctttggccagggcacaagactggagatcaagggaggaggaggctctggaggaggaggctctggagggggaggctctgaggtccaactggttgaatctggagggggcctggtgcaacctggcaggagcctgagactgagctgtgctgcctctggcttcacctttgatgactatgccatgaactgggtgagacaggcccctggcaagggcctggagtgggtgtctggcatcagctggagctctggcagcatggactatgcagattctgtgaagggcaggttcaccatcagcagagataatgccaagaacagcctgtacctgcagatgaacagcctcaggacagaggacacagccctgtactactgtgccaaggccagagaagtgggtgactactatggcatggatgtgtggggccagggcaccacagtgacagtgagctctgggggaggaggctcaggtgggggtggcagtgcccatcctggcagacctagagctgtgcccacacagtgtgatgtgcctccaaacagcagatttgactgtgcccctgacaaggccatcacacaagagcagtgtgaagccagaggctgctgttacatccctgccaagcaaggactgcaaggggctcagatgggacagccctggtgcttcttcccaccatcttaccccagctacaagctggaaaacctgagcagctctgagatgggctacactgctacactgaccagaaccacacctacattcttcccaaaggacatcctgacactgaggctggatgtgatgatggaaacagagaacaggctgcacttcaccatcaaggaccctgccaatagaagatatgaggtgcccctggaaacccctcatgtgcactctagagccccatctccactgtactctgtggaattttctgaggaaccctttggggtcatagtcagaaggcagctggatggcagagtgctgctgaacacaactgtggcccctctgttctttgctgatcagttcctgcagctgagcaccagcctgcctagccagtatatcacaggcctggcagagcacctgtctccactgatgctgagcacatcctggaccagaatcaccctgtggaacagagacctggctcccacacctggggccaacctgtatggctctcaccccttctatctggccctggaagatggtggttcagcccatggtgtctttctgctgaactccaatgccatggatgtggtgctgcagccctctcctgctctgtcttggagaagcactggtggcatcctggatgtgtacatctttctgggccctgagcctaagtctgtggtgcagcagtacctggatgttgtgggctaccccttcatgcctccttattggggcctgggcttccacctgtgcagatggggatacagcagcacagccatcaccagacaggttgtggaaaacatgaccagagcacacttcccactggatgtgcagtggaatgacctggactacatggacagcagaagggacttcaccttcaacaaggatggcttcagagacttccctgccatggtgcaagagctgcaccaaggtggtagaagatatatgatgattgtggacccagccatcagctcctctggaccagctggcagctacagaccctatgatgagggactgagaagaggggtgttcatcaccaatgagacaggccagcctctgattggcaaagtgtggccaggctccacagcctttccagatttcacaaaccccacagctctggcttggtgggaagatatggtggcagagttccatgatcaggtgccctttgatggcatgtggattgacatgaatgagcccagcaacttcatcaggggctctgaggatggatgccccaacaatgaactggaaaatcctccttatgtgcctggtgttgttggagggacactgcaggcagccacaatttgtgccagctctcaccagtttctgagcacccactacaacctgcacaatctgtatggcctgactgaggccattgccagccacagggctcttgtgaaggctagaggcaccagaccttttgtgatcagcaggtccacctttgctggccatggcagatatgctggccactggactggggatgtgtggtctagttgggagcagctggctagctctgtgcctgagatcctgcagttcaacctgctgggagtgccccttgttggagcagatgtgtgtggcttcctgggcaacacctcagaggaactgtgtgtcagatggactcagctgggagcattctaccctttcatgagaaaccacaacagcctgctgagcctgcctcaagagccttacagcttttctgagccagcacagcaggccatgagaaaggccctgactctgagatatgccctgctgcctcacctgtacaccctgttccatcaggctcatgtggctggggagactgtggctagacccctgttcctggaattccccaaggacagctccacctggacagtggatcatcagctgctgtggggagaagccctgctgattacacctgtgctgcaggctggcaaggctgaagtgacaggctacttccctcttggcacttggtatgacctgcagacagtgcctgtggaagctctgggatctctgcctccacctcctgctgctcctagagagcctgccattcactctgaaggccagtgggttaccctgcctgctccactggataccatcaatgtgcatctgagagcaggctacatcatccctctgcaaggccctggcctgaccaccacagaatctagacagcagccaatggcactggctgtggccctgaccaaaggtggagaagctagaggggagctgttctgggatgatggggagagcctggaagtgctggaaagaggggcctatacacaagtgatttttctggctaggaacaataccattgtgaatgagcttgtcagagtcacctctgaaggtgctggcctgcagctccagaaagtgacagtgcttggagtggccacagcaccccagcaagtgctgtctaatggggtgccagtgtccaacttcacatacagccctgataccaaggtcctggacatctgtgtgtccctgcttatgggagagcagttcctggtgtcttggtgctaataacctctactgtgccttctagttgccagccatctgttgtttgcccctcccccttgccttccttgaccctggaaggtgccactcccactgtcctttcctaataaaatgaggaaattgcatcacattgtctgagtaggtgtcattctattctggggggtggggtggggcaggacagcaagggggaggattgggaagacaatagcaggcatgctggggatgcagtgggctctatggcttctgaggtggaaagaaccagctggggctctagggggtatccccagatctaggaacccctagtgatggagttggccactccctctctgcgcgctcgctcgctcactgaggccgggcgaccaaaggtcgcccgacgcccgggctttgcccgggcggcctcagtgagcgagcgagcgcgcag

SEQ ID NO: 874 - DNA, 3993 bp, synthetic construct; identical to SEQ ID NO: 851
  source 1..3993: mol_type = other DNA
  misc_feature 1..130: note = 130 bp AAV2 ITR-L
  misc_feature 139..238: note = mAlb SA
  misc_feature 241..591: note = 12450 VH anti-CD63
  misc_feature 592..636: note = 3X G4S linker
  misc_feature 637..960: note = 3-20 ULC light chain VL
  misc_feature 961..975: note = 1X G4S linker
  misc_feature 976..3624: note = GAA CpG
  misc_feature 3631..3857: note = SV40 polyA
  misc_feature 3864..3993: note = 130 bp AAV2 ITR-R

SEQ ID NO: 875 - DNA, 4270 bp, synthetic construct
  source 1..4270: mol_type = other DNA
  misc_feature 1..130: note = 130_bp_AAV2_ITR_-_Left
  misc_feature 139..238: note = mAlb_SA
  misc_feature 241..3624: note = 12450 anti-CD63 scFv:GAA
  misc_feature 3631..3906: note = bGHpA
  misc_feature 3908..4134: note = SV40_late_polyA
  misc_feature 4141..4270: note = 130_bp_AAV2_ITR_-_R
ctgcgcgctcgctcgctcactgaggccgcccgggcaaagcccgggcgtcgggcgacctttggtcgcccggcctcagtgagcgagcgagcgcgcagagagggagtggccaactccatcactaggggttcctagatctcttaggtcagtgaagagaagaacaaaaagcagcatattacagttagttgtcttcatcaatctttaaatatgttgtgtggtttttctctccctgtttccacagttcaggtccagctgcaagagtctggccccaaggtggtcaagccctctgagacactgagcctgacctgcacagtgtctggtggcagcatcagcagctactactggaactggatcagacagagccctggcaaaggcctggaatggattggctacaccaagagaggctacacagactacaaccccagcctgagaagcagagtgaccatctctgaggacaccagcaagaaccagttcagcctgaggatcagctctgtgacagctgctgacacagcagtttactactgtgcccagatgggctggggcagccatgcctttgatatgtggggccagggcacaatggtggctgtgtccagtgggggctcaggaggaggtggctcaggaggtggaggttcaggaggggagattgtgctgacccagtctcctggcacactgtctctgagccctggggaaagagccacactgagctgtagagccagccagtctgtgtcctctagctacctggcctggtatcagcagaagcctggacaggctcccagactgctgatctatggggcctcttctagagccacaggcatccctgacagattcagtggcagtggctctggcacagacttcaccctgaccatcagcagactggaacctgaggactttgctgtgtactattgccagcagtatggcagcagcccctggacatttggacagggcaccaaggtggaaatcaaagggggtggtggctctgcccatcctggcagacctagagctgtgcccacacagtgtgatgtgcctccaaacagcagatttgactgtgcccctgacaaggccatcacacaagagcagtgtgaagccagaggctgctgttacatccctgccaagcaaggactgcaaggggctcagatgggacagccctggtgcttcttcccaccatcttaccccagctacaagctggaaaacctgagcagctctgagatgggctacactgctacactgaccagaaccacacctacattcttcccaaaggacatcctgacactgaggctggatgtgatgatggaaacagagaacaggctgcacttcaccatcaaggaccctgccaatagaagatatgaggtgcccctggaaacccctcatgtgcactctagagccccatctccactgtactctgtggaattttctgaggaaccctttggggtcatagtcagaaggcagctggatggcagagtgctgctgaacacaactgtggcccctctgttctttgctgatcagttcctgcagctgagcaccagcctgcctagccagtatatcacaggcctggcagagcacctgtctccactgatgctgagcacatcctggaccagaatcaccctgtggaacagagacctggctcccacacctggggccaacctgtatggctctcaccccttctatctggccctggaagatggtggttcagcccatggtgtctttctgctgaactccaatgccatggatgtggtgctgcagccctctcctgctctgtcttggagaagcactggtggcatcctggatgtgtacatctttctgggccctgagcctaagtctgtggtgcagcagtacctggatgttgtgggctaccccttcatgcctccttattggggcctgggcttccacctgtgcagatggggatacagcagcacagccatcaccagacaggttgtggaaaacatgaccagagcacacttcccactggatgtgcagtggaatgacctggactacatggacagcagaagggacttcaccttcaacaaggatggcttcagagacttccctgccatggtgcaagagctgcaccaagggggcagaagatatatgatgattgtggacccagccatcagctcctctggaccagctggcagctacagaccctatgatgagggactgagaagaggggtgttcatcaccaatgagacaggccagcctctgattggcaaagtgtggccaggctccacagcctttccagatttcacaaaccccacagctctggcttggtgggaagatatggtggcagagttccatgatcaggtgccctttgatggcatgtggattgacatgaatgagcccagcaacttcatcaggggctctgaggatggatgccccaacaatgaactggaaaatcctccttatgtgcctggtgttgttggagggacactgcaggcagccacaatttgtgccagctctcaccagtttctgagcacccactacaacctgcacaatctgtatggcctgactgaggccattgccagccacagggctcttgtgaaggctagaggcaccagaccttttgtgatcagcaggtccacctttgctggccatggcagatatgctggccactggactggggatgtgtggtctagttgggagcagctggctagctctgtgcctgagatcctgcagttcaacctgctgggagtgccccttgttggagcagatgtgtgtggcttcctgggcaacacctcagaggaactgtgtgtcagatggactcagctgggagcattctaccctttcatgagaaaccacaacagcctgctgagcctgcctcaagagccttacagcttttctgagccagcacagcaggccatgagaaaggccctgactctgagatatgccctgctgcctcacctgtacaccctgttccatcaggctcatgtggctggggagactgtggctagacccctgttcctggaattccccaaggacagctccacctggacagtggatcatcagctgctgtggggagaagccctgctgattacacctgtgctgcaggctggcaaggctgaagtgacaggctacttccctcttggcacttggtatgacctgcagacagtgcctgtggaagctctgggatctctgcctccacctcctgctgctcctagagagcctgccattcactctgaaggccagtgggttaccctgcctgctccactggataccatcaatgtgcatctgagagcaggctacatcatccctctgcaaggccctggcctgaccaccacagaatctagacagcagccaatggcactggctgtggccctgaccaaagggggagaagctagaggggagctgttctgggatgatggggagagcctggaagtgctggaaagaggggcctatacacaagtgatttttctggctaggaacaataccattgtgaatgagcttgtcagagtcacctctgaaggtgctggcctgcagctccagaaagtgacagtgcttggagtggccacagcaccccagcaagtgctgtctaatggggtgccagtgtccaacttcacatacagccctgataccaaggtcctggacatctgtgtgtccctgcttatgggagagcagttcctggtgtcttggtgctaataacctctactgtgccttctagttgccagccatctgttgtttgcccctcccccttgccttccttgaccctggaaggtgccactcccactgtcctttcctaataaaatgaggaaattgcatcacattgtctgagtaggtgtcattctattctggggggtggggtggggcaggacagcaagggggaggattgggaagacaatagcaggcatgctggggatgcagtgggctctatggcttctgaggtggaaagaaccagctggggctctagggggtatccccagacatgataagatacattgatgagtttggacaaaccacaactagaatgcagtgaaaaaaatgcttgatttgtgaaatttgtgatgctattgcttgatttgtaaccattataagctgcaataaacaagttaacaacaacaattgcattcattttatgtttcaggttcagggggaggtgtgggaggttttttaaagcaagtaaaacctctacaaatgtggtatggctgaagatctaggaacccctagtgatggagttggccactccctctctgcgcgctcgctcgctcactgaggccgggcgaccaaaggtcgcccgacgcccgggctttgcccgggcggcctcagtgagcgagcgagcgcgcag

SEQ ID NO: 876 - DNA, 4042 bp, synthetic construct
  source 1..4042: mol_type = other DNA
  misc_feature 1..130: note = 130bp AAV2 ITR L
  misc_feature 139..238: note = mAlb SA
  misc_feature 241..3624: note = 12450 anti-CD63 scFv:GAA
  misc_feature 3631..3906: note = bGH pA
  misc_feature 3913..4042: note = 130bp AAV2 ITR R
ctgcgcgctcgctcgctcactgaggccgcccgggcaaagcccgggcgtcgggcgacctttggtcgcccggcctcagtgagcgagcgagcgcgcagagagggagtggccaactccatcactaggggttcctagatctcttaggtcagtgaagagaagaacaaaaagcagcatattacagttagttgtcttcatcaatctttaaatatgttgtgtggtttttctctccctgtttccacagttcaggtccagctgcaagagtctggccccaaggtggtcaagccctctgagacactgagcctgacctgcacagtgtctggtggcagcatcagcagctactactggaactggatcagacagagccctggcaaaggcctggaatggattggctacaccaagagaggctacacagactacaaccccagcctgagaagcagagtgaccatctctgaggacaccagcaagaaccagttcagcctgaggatcagctctgtgacagctgctgacacagcagtttactactgtgcccagatgggctggggcagccatgcctttgatatgtggggccagggcacaatggtggctgtgtccagtgggggctcaggaggaggtggctcaggaggtggaggttcaggaggggagattgtgctgacccagtctcctggcacactgtctctgagccctggggaaagagccacactgagctgtagagccagccagtctgtgtcctctagctacctggcctggtatcagcagaagcctggacaggctcccagactgctgatctatggggcctcttctagagccacaggcatccctgacagattcagtggcagtggctctggcacagacttcaccctgaccatcagcagactggaacctgaggactttgctgtgtactattgccagcagtatggcagcagcccctggacatttggacagggcaccaaggtggaaatcaaagggggtggtggctctgcccatcctggcagacctagagctgtgcccacacagtgtgatgtgcctccaaacagcagatttgactgtgcccctgacaaggccatcacacaagagcagtgtgaagccagaggctgctgttacatccctgccaagcaaggactgcaaggggctcagatgggacagccctggtgcttcttcccaccatcttaccccagctacaagctggaaaacctgagcagctctgagatgggctacactgctacactgaccagaaccacacctacattcttcccaaaggacatcctgacactgaggctggatgtgatgatggaaacagagaacaggctgcacttcaccatcaaggaccctgccaatagaagatatgaggtgcccctggaaacccctcatgtgcactctagagccccatctccactgtactctgtggaattttctgaggaaccctttggggtcatagtcagaaggcagctggatggcagagtgctgctgaacacaactgtggcccctctgttctttgctgatcagttcctgcagctgagcaccagcctgcctagccagtatatcacaggcctggcagagcacctgtctccactgatgctgagcacatcctggaccagaatcaccctgtggaacagagacctggctcccacacctggggccaacctgtatggctctcaccccttctatctggccctggaagatggtggttcagcccatggtgtctttctgctgaactccaatgccatggatgtggtgctgcagccctctcctgctctgtcttggagaagcactggtggcatcctggatgtgtacatctttctgggccctgagcctaagtctgtggtgcagcagtacctggatgttgtgggctaccccttcatgcctccttattggggcctgggcttccacctgtgcagatggggatacagcagcacagccatcaccagacaggttgtggaaaacatgaccagagcacacttcccactggatgtgcagtggaatgacctggactacatggacagcagaagggacttcaccttcaacaaggatggcttcagagacttccctgccatggtgcaagagctgcaccaagggggcagaagatatatgatgattgtggacccagccatcagctcctctggaccagctggcagctacagaccctatgatgagggactgagaagaggggtgttcatcaccaatgagacaggccagcctctgattggcaaagtgtggccaggctccacagcctttccagatttcacaaaccccacagctctggcttggtgggaagatatggtggcagagttccatgatcaggtgccctttgatggcatgtggattgacatgaatgagcccagcaacttcatcaggggctctgaggatggatgccccaacaatgaactggaaaatcctccttatgtgcctggtgttgttggagggacactgcaggcagccacaatttgtgccagctctcaccagtttctgagcacccactacaacctgcacaatctgtatggcctgactgaggccattgccagccacagggctcttgtgaaggctagaggcaccagaccttttgtgatcagcaggtccacctttgctggccatggcagatatgctggccactggactggggatgtgtggtctagttgggagcagctggctagctctgtgcctgagatcctgcagttcaacctgctgggagtgccccttgttggagcagatgtgtgtggcttcctgggcaacacctcagaggaactgtgtgtcagatggactcagctgggagcattctaccctttcatgagaaaccacaacagcctgctgagcctgcctcaagagccttacagcttttctgagccagcacagcaggccatgagaaaggccctgactctgagatatgccctgctgcctcacctgtacaccctgttccatcaggctcatgtggctggggagactgtggctagacccctgttcctggaattccccaaggacagctccacctggacagtggatcatcagctgctgtggggagaagccctgctgattacacctgtgctgcaggctggcaaggctgaagtgacaggctacttccctcttggcacttggtatgacctgcagacagtgcctgtggaagctctgggatctctgcctccacctcctgctgctcctagagagcctgccattcactctgaaggccagtgggttaccctgcctgctccactggataccatcaatgtgcatctgagagcaggctacatcatccctctgcaaggccctggcctgaccaccacagaatctagacagcagccaatggcactggctgtggccctgaccaaagggggagaagctagaggggagctgttctgggatgatggggagagcctggaagtgctggaaagaggggcctatacacaagtgatttttctggctaggaacaataccattgtgaatgagcttgtcagagtcacctctgaaggtgctggcctgcagctccagaaagtgacagtgcttggagtggccacagcaccccagcaagtgctgtctaatggggtgccagtgtccaacttcacatacagccctgataccaaggtcctggacatctgtgtgtccctgcttatgggagagcagttcctggtgtcttggtgctaataacctctactgtgccttctagttgccagccatctgttgtttgcccctcccccttgccttccttgaccctggaaggtgccactcccactgtcctttcctaataaaatgaggaaattgcatcacattgtctgagtaggtgtcattctattctggggggtggggtggggcaggacagcaagggggaggattgggaagacaatagcaggcatgctggggatgcagtgggctctatggcttctgaggtggaaagaaccagctggggctctagggggtatccccagatctaggaacccctagtgatggagttggccactccctctctgcgcgctcgctcgctcactgaggccgggcgaccaaaggtcgcccgacgcccgggctttgcccgggcggcctcagtgagcgagcgagcgcgcag

SEQ ID NO: 877 - DNA, 4269 bp, synthetic construct
  source 1..4269: mol_type = other DNA
  misc_feature 1..130: note = 130_bp_AAV2_ITR_-_Left
  misc_feature 139..238: note = mAlb_SA
  misc_feature 241..3624: note = 12450 anti-CD63 scFv:GAA
  misc_feature 3631..3906: note = bGH_pA
  misc_feature 3907..4133: note = SV40_late_polyA
  misc_feature 4140..4269: note = 130_bp_AAV2_ITR_-_R
ctgcgcgctcgctcgctcactgaggccgcccgggcaaagcccgggcgtcgggcgacctttggtcgcccggcctcagtgagcgagcgagcgcgcagagagggagtggccaactccatcactaggggttcctagatctcttaggtcagtgaagagaagaacaaaaagcagcatattacagttagttgtcttcatcaatctttaaatatgttgtgtggtttttctctccctgtttccacagttcaggtccagctgcaagagtctggccccaaggtggtcaagccctctgagacactgagcctgacctgcacagtgtctggtggcagcatcagcagctactactggaactggatcagacagagccctggcaaaggcctggaatggattggctacaccaagagaggctacacagactacaaccccagcctgagaagcagagtgaccatctctgaggacaccagcaagaaccagttcagcctgaggatcagctctgtgacagctgctgacacagcagtgtactactgtgcccagatgggctggggcagccatgcctttgatatgtggggccagggcacaatggtggctgtgtccagtgggggctcaggaggaggtggctcaggaggtggaggttcaggaggggagattgtgctgacccagtctcctggcacactgtctctgagccctggggaaagagccacactgagctgtagagccagccagtctgtgtcctctagctacctggcctggtatcagcagaagcctggacaggctcccagactgctgatctatggggcctcttctagagccacaggcatccctgacagattcagtggcagtggctctggcacagacttcaccctgaccatcagcagactggaacctgaggactttgctgtgtactattgccagcagtatggcagcagcccctggacatttggacagggcaccaaggtggaaatcaaaggtggtggtggctctgcccatcctggcagacctagagctgtgcccacacagtgtgatgtgcctccaaacagcagatttgactgtgcccctgacaaggccatcacacaagagcagtgtgaagccagaggctgctgttacatccctgccaagcaaggactgcaaggggctcagatgggacagccctggtgcttcttcccaccatcttaccccagctacaagctggaaaacctgagcagctctgagatgggctacactgctacactgaccagaaccacacctacattcttcccaaaggacatcctgacactgaggctggatgtgatgatggaaacagagaacaggctgcacttcaccatcaaggaccctgccaatagaagatatgaggtgcccctggaaacccctcatgtgcactctagagccccatctccactgtactctgtggaattttctgaggaaccctttggggtcatagtcagaaggcagctggatggcagagtgctgctgaacacaactgtggcccctctgttctttgctgatcagttcctgcagctgagcaccagcctgcctagccagtatatcacaggcctggcagagcacctgtctccactgatgctgagcacatcctggaccagaatcaccctgtggaacagagacctggctcccacacctggggccaacctgtatggctctcaccccttctatctggccctggaagatggtggttcagcccatggtgtctttctgctgaactccaatgccatggatgtggtgctgcagccctctcctgctctgtcttggagaagcactggtggcatcctggatgtgtacatctttctgggccctgagcctaagtctgtggtgcagcagtacctggatgttgtgggctaccccttcatgcctccttattggggcctgggcttccacctgtgcagatggggatacagcagcacagccatcaccagacaggttgtggaaaacatgaccagagcacacttcccactggatgtgcagtggaatgacctggactacatggacagcagaagggacttcaccttcaacaaggatggcttcagagacttccctgccatggtgcaagagctgcaccaaggtggtagaagatatatgatgattgtggacccagccatcagctcctctggaccagctggcagctacagaccctatgatgagggactgagaagaggggtgttcatcaccaatgagacaggccagcctctgattggcaaagtgtggccaggctccacagcctttccagatttcacaaaccccacagctctggcttggtgggaagatatggtggcagagttccatgatcaggtgccctttgatggcatgtggattgacatgaatgagcccagcaacttcatcaggggctctgaggatggatgccccaacaatgaactggaaaatcctccttatgtgcctggtgttgttggagggacactgcaggcagccacaatttgtgccagctctcaccagtttctgagcacccactacaacctgcacaatctgtatggcctgactgaggccattgccagccacagggctcttgtgaaggctagaggcaccagaccttttgtgatcagcaggtccacctttgctggccatggcagatatgctggccactggactggggatgtgtggtctagttgggagcagctggctagctctgtgcctgagatcctgcagttcaacctgctgggagtgccccttgttggagcagatgtgtgtggcttcctgggcaacacctcagaggaactgtgtgtcagatggactcagctgggagcattctaccctttcatgagaaaccacaacagcctgctgagcctgcctcaagagccttacagcttttctgagccagcacagcaggccatgagaaaggccctgactctgagatatgccctgctgcctcacctgtacaccctgttccatcaggctcatgtggctggggagactgtggctagacccctgttcctggaattccccaaggacagctccacctggacagtggatcatcagctgctgtggggagaagccctgctgattacacctgtgctgcaggctggcaaggctgaagtgacaggctacttccctcttggcacttggtatgacctgcagacagtgcctgtggaagctctgggatctctgcctccacctcctgctgctcctagagagcctgccattcactctgaaggccagtgggttaccctgcctgctccactggataccatcaatgtgcatctgagagcaggctacatcatccctctgcaaggccctggcctgaccaccacagaatctagacagcagccaatggcactggctgtggccctgaccaaagggggagaagctagaggggagctgttctgggatgatggggagagcctggaagtgctggaaagaggggcctatacacaagtgatttttctggctaggaacaataccattgtgaatgagcttgtcagagtcacctctgaaggtgctggcctgcagctccagaaagtgacagtgcttggagtggccacagcaccccagcaagtgctgtctaatggggtgccagtgtccaacttcacatacagccctgataccaaggtcctggacatctgtgtgtccctgcttatgggagagcagttcctggtgtcttggtgctaataacctctactgtgccttctagttgccagccatctgttgtttgcccctcccccttgccttccttgaccctggaaggtgccactcccactgtcctttcctaataaaatgaggaaattgcatcacattgtctgagtaggtgtcattctattctggggggtggggtggggcaggacagcaagggggaggattgggaagacaatagcaggcatgctggggatgcagtgggctctatggcttctgaggtggaaagaaccagctggggctctagggggtatccccgacatgataagatacattgatgagtttggacaaaccacaactagaatgcagtgaaaaaaatgcttgatttgtgaaatttgtgatgctattgcttgatttgtaaccattataagctgcaataaacaagttaacaacaacaattgcattcattttatgtttcaggttcagggggaggtgtgggaggttttttaaagcaagtaaaacctctacaaatgtggtatggctgaagatctaggaacccctagtgatggagttggccactccctctctgcgcgctcgctcgctcactgaggccgggcgaccaaaggtcgcccgacgcccgggctttgcccgggcggcctcagtgagcgagcgagcgcgcag

SEQ ID NO: 878 - DNA, 4042 bp, synthetic construct
  source 1..4042: mol_type = other DNA
  misc_feature 1..130: note = 130_bp_AAV2_ITR_-_Left
  misc_feature 139..238: note = mAlb_SA
  misc_feature 241..3624: note = 12450 anti-CD63 scFv:GAA
  misc_feature 3631..3906: note = bGH_pA
  misc_feature 3913..4042: note = 130_bp_AAV2_ITR_-_R
ctgcgcgctcgctcgctcactgaggccgcccgggcaaagcccgggcgtcgggcgacctttggtcgcccggcctcagtgagcgagcgagcgcgcagagagggagtggccaactccatcactaggggttcctagatctcttaggtcagtgaagagaagaacaaaaagcagcatattacagttagttgtcttcatcaatctttaaatatgttgtgtggtttttctctccctgtttccacagttcaggtccagctgcaagagtctggccccaaggtggtcaagccctctgagacactgagcctgacctgcacagtgtctggtggcagcatcagcagctactactggaactggatcagacagagccctggcaaaggcctggaatggattggctacaccaagagaggctacacagactacaaccccagcctgagaagcagagtgaccatctctgaggacaccagcaagaaccagttcagcctgaggatcagctctgtgacagctgctgacacagcagtgtactactgtgcccagatgggctggggcagccatgcctttgatatgtggggccagggcacaatggtggctgtgtccagtgggggctcaggaggaggtggctcaggaggtggaggttcaggaggggagattgtgctgacccagtctcctggcacactgtctctgagccctggggaaagagccacactgagctgtagagccagccagtctgtgtcctctagctacctggcctggtatcagcagaagcctggacaggctcccagactgctgatctatggggcctcttctagagccacaggcatccctgacagattcagtggcagtggctctggcacagacttcaccctgaccatcagcagactggaacctgaggactttgctgtgtactattgccagcagtatggcagcagcccctggacatttggacagggcaccaaggtggaaatcaaaggtggtggtggctctgcccatcctggcagacctagagctgtgcccacacagtgtgatgtgcctccaaacagcagatttgactgtgcccctgacaaggccatcacacaagagcagtgtgaagccagaggctgctgttacatccctgccaagcaaggactgcaaggggctcagatgggacagccctggtgcttcttcccaccatcttaccccagctacaagctggaaaacctgagcagctctgagatgggctacactgctacactgaccagaaccacacctacattcttcccaaaggacatcctgacactgaggctggatgtgatgatggaaacagagaacaggctgcacttcaccatcaaggaccctgccaatagaagatatgaggtgcccctggaaacccctcatgtgcactctagagccccatctccactgtactctgtggaattttctgaggaaccctttggggtcatagtcagaaggcagctggatggcagagtgctgctgaacacaactgtggcccctctgttctttgctgatcagttcctgcagctgagcaccagcctgcctagccagtatatcacaggcctggcagagcacctgtctccactgatgctgagcacatcctggaccagaatcaccctgtggaacagagacctggctcccacacctggggccaacctgtatggctctcaccccttctatctggccctggaagatggtggttcagcccatggtgtctttctgctgaactccaatgccatggatgtggtgctgcagccctctcctgctctgtcttggagaagcactggtggcatcctggatgtgtacatctttctgggccctgagcctaagtctgtggtgcagcagtacctggatgttgtgggctaccccttcatgcctccttattggggcctgggcttccacctgtgcagatggggatacagcagcacagccatcaccagacaggttgtggaaaacatgaccagagcacacttcccactggatgtgcagtggaatgacctggactacatggacagcagaagggacttcaccttcaacaaggatggcttcagagacttccctgccatggtgcaagagctgcaccaaggtggtagaagatatatgatgattgtggacccagccatcagctcctctggaccagctggcagctacagaccctatgatgagggactgagaagaggggtgttcatcaccaatgagacaggccagcctctgattggcaaagtgtggccaggctccacagcctttccagatttcacaaaccccacagctctggcttggtgggaagatatggtggcagagttccatgatcaggtgccctttgatggcatgtggattgacatgaatgagcccagcaacttcatcaggggctctgaggatggatgccccaacaatgaactggaaaatcctccttatgtgcctggtgttgttggagggacactgcaggcagccacaatttgtgccagctctcaccagtttctgagcacccactacaacctgcacaatctgtatggcctgactgaggccattgccagccacagggctcttgtgaaggctagaggcaccagaccttttgtgatcagcaggtccacctttgctggccatggcagatatgctggccactggactggggatgtgtggtctagttgggagcagctggctagctctgtgcctgagatcctgcagttcaacctgctgggagtgccccttgttggagcagatgtgtgtggcttcctgggcaacacctcagaggaactgtgtgtcagatggactcagctgggagcattctaccctttcatgagaaaccacaacagcctgctgagcctgcctcaagagccttacagcttttctgagccagcacagcaggccatgagaaaggccctgactctgagatatgccctgctgcctcacctgtacaccctgttccatcaggctcatgtggctggggagactgtggctagacccctgttcctggaattccccaaggacagctccacctggacagtggatcatcagctgctgtggggagaagccctgctgattacacctgtgctgcaggctggcaaggctgaagtgacaggctacttccctcttggcacttggtatgacctgcagacagtgcctgtggaagctctgggatctctgcctccacctcctgctgctcctagagagcctgccattcactctgaaggccagtgggttaccctgcctgctccactggataccatcaatgtgcatctgagagcaggctacatcatccctctgcaaggccctggcctgaccaccacagaatctagacagcagccaatggcactggctgtggccctgaccaaagggggagaagctagaggggagctgttctgggatgatggggagagcctggaagtgctggaaagaggggcctatacacaagtgatttttctggctaggaacaataccattgtgaatgagcttgtcagagtcacctctgaaggtgctggcctgcagctccagaaagtgacagtgcttggagtggccacagcaccccagcaagtgctgtctaatggggtgccagtgtccaacttcacatacagccctgataccaaggtcctggacatctgtgtgtccctgcttatgggagagcagttcctggtgtcttggtgctaataacctctactgtgccttctagttgccagccatctgttgtttgcccctcccccttgccttccttgaccctggaaggtgccactcccactgtcctttcctaataaaatgaggaaattgcatcacattgtctgagtaggtgtcattctattctggggggtggggtggggcaggacagcaagggggaggattgggaagacaatagcaggcatgctggggatgcagtgggctctatggcttctgaggtggaaagaaccagctggggctctagggggtatccccagatctaggaacccctagtgatggagttggccactccctctctgcgcgctcgctcgctcactgaggccgggcgaccaaaggtcgcccgacgcccgggctttgcccgggcggcctcagtgagcgagcgagcgcgcag

SEQ ID NO: 879 - DNA, 4042 bp, synthetic construct
  source 1..4042: mol_type = other DNA
  misc_feature 1..130: note = 130_bp_AAV2_ITR_-_Left
  misc_feature 139..238: note = mAlb_SA
  misc_feature 241..3624: note = 12450 anti-CD63 scFv:GAA
  misc_feature 3631..3906: note = bGH_pA
  misc_feature 3913..4042: note = 130_bp_AAV2_ITR_-_R
ctgcgcgctcgctcgctcactgaggccgcccgggcaaagcccgggcgtcgggcgacctttggtcgcccggcctcagtgagcgagcgagcgcgcagagagggagtggccaactccatcactaggggttcctagatctcttaggtcagtgaagagaagaacaaaaagcagcatattacagttagttgtcttcatcaatctttaaatatgttgtgtggtttttctctccctgtttccacagttcaggtccagctgcaagagtctggccccaaggtggtcaagccctctgagacactgagcctgacctgcacagtgtctggtggcagcatcagcagctactactggaactggatcagacagagccctggcaaaggcctggaatggattggctacaccaagagaggctacacagactacaaccccagcctgagaagcagagtgaccatctctgaggacaccagcaagaaccagttcagcctgaggatcagctctgtgacagctgctgacacagcagtgtactactgtgcccagatgggctggggcagccatgcctttgatatgtggggccagggcacaatggtggctgtgtccagtgggggctcaggaggaggtggctcaggaggtggaggttcaggaggggagattgtgctgacccagtctcctggcacactgtctctgagccctggggaaagagccacactgagctgtagagccagccagtctgtgtcctctagctacctggcctggtatcagcagaagcctggacaggctcccagactgctgatctatggggcctcttctagagccacaggcatccctgacagattcagtggcagtggctctggcacagacttcaccctgaccatcagcagactggaacctgaggactttgctgtgtactattgccagcagtatggcagcagcccctggacatttggacagggcaccaaggtggaaatcaaaggtggtggtggctctgcccatcctggcagacctagagctgtgcccacacagtgtgatgtgcctccaaacagcagatttgactgtgcccctgacaaggccatcacacaagagcagtgtgaagccagaggctgctgttacatccctgccaagcaaggactgcaaggggctcagatgggacagccctggtgcttcttcccaccatcttaccccagctacaagctggaaaacctgagcagctctgagatgggctacactgctacactgaccagaaccacacctacattcttcccaaaggacatcctgacactgaggctggatgtgatgatggaaacagagaacaggctgcacttcaccatcaaggaccctgccaatagaagatatgaggtgcccctggaaacccctcatgtgcactctagagccccatctccactgtactctgtggaattttctgaggaaccctttggggtcatagtcagaaggcagctggatggcagagtgctgctgaacacaactgtggcccctctgttctttgctgatcagttcctgcagctgagcaccagcctgcctagccagtatatcacaggcctggcagagcacctgtctccactgatgctgagcacatcctggaccagaatcaccctgtggaacagagacctggctcccacacctggggccaacctgtatggctctcaccccttctatctggccctggaagatggtggttcagcccatggtgtctttctgctgaactccaatgccatggatgtggtgctgcagccctctcctgctctgtcttggagaagcactggtggcatcctggatgtgtacatctttctgggccctgagcctaagtctgtggtgcagcagtacctggatgttgtgggctaccccttcatgcctccttattggggcctgggcttccacctgtgcagatggggatacagcagcacagccatcaccagacaggttgtggaaaacatgaccagagcacacttcccactggatgtgcagtggaatgacctggactacatggacagcagaagggacttcaccttcaacaaggatggcttcagagacttccctgccatggtgcaagagctgcaccaaggtggtagaagatatatgatgattgtggacccagccatcagctcctctggaccagctggcagctacagaccctatgatgagggactgagaagaggggtgttcatcaccaatgagacaggccagcctctgattggcaaagtgtggccaggctccacagcctttccagatttcacaaaccccacagctctggcttggtgggaagatatggtggcagagttccatgatcaggtgccctttgatggcatgtggattgacatgaatgagcccagcaacttcatcaggggctctgaggatggatgccccaacaatgaactggaaaatcctccttatgtgcctggtgttgttggagggacactgcaggcagccacaatttgtgccagctctcaccagtttctgagcacccactacaacctgcacaatctgtatggcctgactgaggccattgccagccacagggctcttgtgaaggctagaggcaccagaccttttgtgatcagcaggtccacctttgctggccatggcagatatgctggccactggactggggatgtgtggtctagttgggagcagctggctagctctgtgcctgagatcctgcagttcaacctgctgggagtgccccttgttggagcagatgtgtgtggcttcctgggcaacacctcagaggaactgtgtgtcagatggactcagctgggagcattctaccctttcatgagaaaccacaacagcctgctgagcctgcctcaagagccttacagcttttctgagccagcacagcaggccatgagaaaggccctgactctgagatatgccctgctgcctcacctgtacaccctgttccatcaggctcatgtggctggggagactgtggctagacccctgttcctggaattccccaaggacagctccacctggacagtggatcatcagctgctgtggggagaagccctgctgattacacctgtgctgcaggctggcaaggctgaagtgacaggctacttccctcttggcacttggtatgacctgcagacagtgcctgtggaagctctgggatctctgcctccacctcctgctgctcctagagagcctgccattcactctgaaggccagtgggttaccctgcctgctccactggataccatcaatgtgcatctgagagcaggctacatcatccctctgcaaggccctggcctgaccaccacagaatctagacagcagccaatggcactggctgtggccctgaccaaaggtggagaagctagaggggagctgttctgggatgatggggagagcctggaagtgctggaaagaggggcctatacacaagtgatttttctggctaggaacaataccattgtgaatgagcttgtcagagtcacctctgaaggtgctggcctgcagctccagaaagtgacagtgcttggagtggccacagcaccccagcaagtgctgtctaatggggtgccagtgtccaacttcacatacagccctgataccaaggtcctggacatctgtgtgtccctgcttatgggagagcagttcctggtgtcttggtgctaataacctctactgtgccttctagttgccagccatctgttgtttgcccctcccccttgccttccttgaccctggaaggtgccactcccactgtcctttcctaataaaatgaggaaattgcatcacattgtctgagtaggtgtcattctattctggggggtggggtggggcaggacagcaagggggaggattgggaagacaatagcaggcatgctggggatgcagtgggctctatggcttctgaggtggaaagaaccagctggggctctagggggtatccccagatctaggaacccctagtgatggagttggccactccctctctgcgcgctcgctcgctcactgaggccgggcgaccaaaggtcgcccgacgcccgggctttgcccgggcggcctcagtgagcgagcgagcgcgcag

SEQ ID NO: 880 - DNA, 4091 bp, synthetic construct
  source 1..4091: mol_type = other DNA
  misc_feature 1..130: note = 130_bp_AAV2_ITR_-_Left
  misc_feature 139..238: note = mAlb SA
  misc_feature 241..3624: note = 12450 anti-CD63 scFv:GAA_
  misc_feature 3631..3906: note = bGH pA
  misc_feature 3907..3955: note = sPA
  misc_feature 3962..4091: note = 130_bp_AAV2_ITR_-_R
ctgcgcgctcgctcgctcactgaggccgcccgggcaaagcccgggcgtcgggcgacctttggtcgcccggcctcagtgagcgagcgagcgcgcagagagggagtggccaactccatcactaggggttcctagatctcttaggtcagtgaagagaagaacaaaaagcagcatattacagttagttgtcttcatcaatctttaaatatgttgtgtggtttttctctccctgtttccacagttcaggtccagctgcaagagtctggccccaaggtggtcaagccctctgagacactgagcctgacctgcacagtgtctggtggcagcatcagcagctactactggaactggatcagacagagccctggcaaaggcctggaatggattggctacaccaagagaggctacacagactacaaccccagcctgagaagcagagtgaccatctctgaggacaccagcaagaaccagttcagcctgaggatcagctctgtgacagctgctgacacagcagtgtactactgtgcccagatgggctggggcagccatgcctttgatatgtggggccagggcacaatggtggctgtgtccagtgggggctcaggaggaggtggctcaggaggtggaggttcaggaggggagattgtgctgacccagtctcctggcacactgtctctgagccctggggaaagagccacactgagctgtagagccagccagtctgtgtcctctagctacctggcctggtatcagcagaagcctggacaggctcccagactgctgatctatggggcctcttctagagccacaggcatccctgacagattcagtggcagtggctctggcacagacttcaccctgaccatcagcagactggaacctgaggactttgctgtgtactattgccagcagtatggcagcagcccctggacatttggacagggcaccaaggtggaaatcaaaggtggtggtggctctgcccatcctggcagacctagagctgtgcccacacagtgtgatgtgcctccaaacagcagatttgactgtgcccctgacaaggccatcacacaagagcagtgtgaagccagaggctgctgttacatccctgccaagcaaggactgcaaggggctcagatgggacagccctggtgcttcttcccaccatcttaccccagctacaagctggaaaacctgagcagctctgagatgggctacactgctacactgaccagaaccacacctacattcttcccaaaggacatcctgacactgaggctggatgtgatgatggaaacagagaacaggctgcacttcaccatcaaggaccctgccaatagaagatatgaggtgcccctggaaacccctcatgtgcactctagagccccatctccactgtactctgtggaattttctgaggaaccctttggggtcatagtcagaaggcagctggatggcagagtgctgctgaacacaactgtggcccctctgttctttgctgatcagttcctgcagctgagcaccagcctgcctagccagtatatcacaggcctggcagagcacctgtctccactgatgctgagcacatcctggaccagaatcaccctgtggaacagagacctggctcccacacctggggccaacctgtatggctctcaccccttctatctggccctggaagatggtggttcagcccatggtgtctttctgctgaactccaatgccatggatgtggtgctgcagccctctcctgctctgtcttggagaagcactggtggcatcctggatgtgtacatctttctgggccctgagcctaagtctgtggtgcagcagtacctggatgttgtgggctaccccttcatgcctccttattggggcctgggcttccacctgtgcagatggggatacagcagcacagccatcaccagacaggttgtggaaaacatgaccagagcacacttcccactggatgtgcagtggaatgacctggactacatggacagcagaagggacttcaccttcaacaaggatggcttcagagacttccctgccatggtgcaagagctgcaccaaggtggtagaagatatatgatgattgtggacccagccatcagctcctctggaccagctggcagctacagaccctatgatgagggactgagaagaggggtgttcatcaccaatgagacaggccagcctctgattggcaaagtgtggccaggctccacagcctttccagatttcacaaaccccacagctctggcttggtgggaagatatggtggcagagttccatgatcaggtgccctttgatggcatgtggattgacatgaatgagcccagcaacttcatcaggggctctgaggatggatgccccaacaatgaactggaaaatcctccttatgtgcctggtgttgttggagggacactgcaggcagccacaatttgtgccagctctcaccagtttctgagcacccactacaacctgcacaatctgtatggcctgactgaggccattgccagccacagggctcttgtgaaggctagaggcaccagaccttttgtgatcagcaggtccacctttgctggccatggcagatatgctggccactggactggggatgtgtggtctagttgggagcagctggctagctctgtgcctgagatcctgcagttcaacctgctgggagtgccccttgttggagcagatgtgtgtggcttcctgggcaacacctcagaggaactgtgtgtcagatggactcagctgggagcattctaccctttcatgagaaaccacaacagcctgctgagcctgcctcaagagccttacagcttttctgagccagcacagcaggccatgagaaaggccctgactctgagatatgccctgctgcctcacctgtacaccctgttccatcaggctcatgtggctggggagactgtggctagacccctgttcctggaattccccaaggacagctccacctggacagtggatcatcagctgctgtggggagaagccctgctgattacacctgtgctgcaggctggcaaggctgaagtgacaggctacttccctcttggcacttggtatgacctgcagacagtgcctgtggaagctctgggatctctgcctccacctcctgctgctcctagagagcctgccattcactctgaaggccagtgggttaccctgcctgctccactggataccatcaatgtgcatctgagagcaggctacatcatccctctgcaaggccctggcctgaccaccacagaatctagacagcagccaatggcactggctgtggccctgaccaaaggtggagaagctagaggggagctgttctgggatgatggggagagcctggaagtgctggaaagaggggcctatacacaagtgatttttctggctaggaacaataccattgtgaatgagcttgtcagagtcacctctgaaggtgctggcctgcagctccagaaagtgacagtgcttggagtggccacagcaccccagcaagtgctgtctaatggggtgccagtgtccaacttcacatacagccctgataccaaggtcctggacatctgtgtgtccctgcttatgggagagcagttcctggtgtcttggtgctaataacctctactgtgccttctagttgccagccatctgttgtttgcccctcccccttgccttccttgaccctggaaggtgccactcccactgtcctttcctaataaaatgaggaaattgcatcacattgtctgagtaggtgtcattctattctggggggtggggtggggcaggacagcaagggggaggattgggaagacaatagcaggcatgctggggatgcagtgggctctatggcttctgaggtggaaagaaccagctggggctctagggggtatccccaataaaagatctttattttcattagatctgtgtgttggttttttgtgtgggatctaggaacccctagtgatggagttggccactccctctctgcgcgctcgctcgctcactgaggccgggcgaccaaaggtcgcccgacgcccgggctttgcccgggcggcctcagtgagcgagcgagcgcgcag

SEQ ID NO: 881 - DNA, 4691 bp, synthetic construct
  source 1..4691: mol_type = other DNA
  misc_feature 1..130: note = 130_bp_AAV2_ITR_-_Left
  misc_feature 139..238: note = mAlb SA
  misc_feature 241..3624: note = 12450 anti-CD63 scFv:GAA
  misc_feature 3631..3906: note = bGH pA
  misc_feature 3907..4506: note = Stuffer
  misc_feature 4507..4555: note = sPA
  misc_feature 4562..4691: note = 130_bp_AAV2_ITR_-_R
ctgcgcgctcgctcgctcactgaggccgcccgggcaaagcccgggcgtcgggcgacctttggtcgcccggcctcagtgagcgagcgagcgcgcagagagggagtggccaactccatcactaggggttcctagatctcttaggtcagtgaagagaagaacaaaaagcagcatattacagttagttgtcttcatcaatctttaaatatgttgtgtggtttttctctccctgtttccacagttcaggtccagctgcaagagtctggccccaaggtggtcaagccctctgagacactgagcctgacctgcacagtgtctggtggcagcatcagcagctactactggaactggatcagacagagccctggcaaaggcctggaatggattggctacaccaagagaggctacacagactacaaccccagcctgagaagcagagtgaccatctctgaggacaccagcaagaaccagttcagcctgaggatcagctctgtgacagctgctgacacagcagtgtactactgtgcccagatgggctggggcagccatgcctttgatatgtggggccagggcacaatggtggctgtgtccagtgggggctcaggaggaggtggctcaggaggtggaggttcaggaggggagattgtgctgacccagtctcctggcacactgtctctgagccctggggaaagagccacactgagctgtagagccagccagtctgtgtcctctagctacctggcctggtatcagcagaagcctggacaggctcccagactgctgatctatggggcctcttctagagccacaggcatccctgacagattcagtggcagtggctctggcacagacttcaccctgaccatcagcagactggaacctgaggactttgctgtgtactattgccagcagtatggcagcagcccctggacatttggacagggcaccaaggtggaaatcaaaggtggtggtggctctgcccatcctggcagacctagagctgtgcccacacagtgtgatgtgcctccaaacagcagatttgactgtgcccctgacaaggccatcacacaagagcagtgtgaagccagaggctgctgttacatccctgccaagcaaggactgcaaggggctcagatgggacagccctggtgcttcttcccaccatcttaccccagctacaagctggaaaacctgagcagctctgagatgggctacactgctacactgaccagaaccacacctacattcttcccaaaggacatcctgacactgaggctggatgtgatgatggaaacagagaacaggctgcacttcaccatcaaggaccctgccaatagaagatatgaggtgcccctggaaacccctcatgtgcactctagagccccatctccactgtactctgtggaattttctgaggaaccctttggggtcatagtcagaaggcagctggatggcagagtgctgctgaacacaactgtggcccctctgttctttgctgatcagttcctgcagctgagcaccagcctgcctagccagtatatcacaggcctggcagagcacctgtctccactgatgctgagcacatcctggaccagaatcaccctgtggaacagagacctggctcccacacctggggccaacctgtatggctctcaccccttctatctggccctggaagatggtggttcagcccatggtgtctttctgctgaactccaatgccatggatgtggtgctgcagccctctcctgctctgtcttggagaagcactggtggcatcctggatgtgtacatctttctgggccctgagcctaagtctgtggtgcagcagtacctggatgttgtgggctaccccttcatgcctccttattggggcctgggcttccacctgtgcagatggggatacagcagcacagccatcaccagacaggttgtggaaaacatgaccagagcacacttcccactggatgtgcagtggaatgacctggactacatggacagcagaagggacttcaccttcaacaaggatggcttcagagacttccctgccatggtgcaagagctgcaccaaggtggtagaagatatatgatgattgtggacccagccatcagctcctctggaccagctggcagctacagaccctatgatgagggactgagaagaggggtgttcatcaccaatgagacaggccagcctctgattggcaaagtgtggccaggctccacagcctttccagatttcacaaaccccacagctctggcttggtgggaagatatggtggcagagttccatgatcaggtgccctttgatggcatgtggattgacatgaatgagcccagcaacttcatcaggggctctgaggatggatgccccaacaatgaactggaaaatcctccttatgtgcctggtgttgttggagggacactgcaggcagccacaatttgtgccagctctcaccagtttctgagcacccactacaacctgcacaatctgtatggcctgactgaggccattgccagccacagggctcttgtgaaggctagaggcaccagaccttttgtgatcagcaggtccacctttgctggccatggcagatatgctggccactggactggggatgtgtggtctagttgggagcagctggctagctctgtgcctgagatcctgcagttcaacctgctgggagtgccccttgttggagcagatgtgtgtggcttcctgggcaacacctcagaggaactgtgtgtcagatggactcagctgggagcattctaccctttcatgagaaaccacaacagcctgctgagcctgcctcaagagccttacagcttttctgagccagcacagcaggccatgagaaaggccctgactctgagatatgccctgctgcctcacctgtacaccctgttccatcaggctcatgtggctggggagactgtggctagacccctgttcctggaattccccaaggacagctccacctggacagtggatcatcagctgctgtggggagaagccctgctgattacacctgtgctgcaggctggcaaggctgaagtgacaggctacttccctcttggcacttggtatgacctgcagacagtgcctgtggaagctctgggatctctgcctccacctcctgctgctcctagagagcctgccattcactctgaaggccagtgggttaccctgcctgctccactggataccatcaatgtgcatctgagagcaggctacatcatccctctgcaaggccctggcctgaccaccacagaatctagacagcagccaatggcactggctgtggccctgaccaaaggtggagaagctagaggggagctgttctgggatgatggggagagcctggaagtgctggaaagaggggcctatacacaagtgatttttctggctaggaacaataccattgtgaatgagcttgtcagagtcacctctgaaggtgctggcctgcagctccagaaagtgacagtgcttggagtggccacagcaccccagcaagtgctgtctaatggggtgccagtgtccaacttcacatacagccctgataccaaggtcctggacatctgtgtgtccctgcttatgggagagcagttcctggtgtcttggtgctaataacctctactgtgccttctagttgccagccatctgttgtttgcccctcccccttgccttccttgaccctggaaggtgccactcccactgtcctttcctaataaaatgaggaaattgcatcacattgtctgagtaggtgtcattctattctggggggtggggtggggcaggacagcaagggggaggattgggaagacaatagcaggcatgctggggatgcagtgggctctatggcttctgaggtggaaagaaccagctggggctctagggggtatccccaatgtaatagtcacggacattattatcggtctgggatgtcatagtagcttaacggtagcgtgttggaacggtattcggtcacacaaccatgcgacacgtttaagttctgatacagtgcaaagggcttctcatccaattggtctacctgaagactatggtagacatctatgctgccaagttgattttggggtacagtaactgtctaaactagaagatcttttttctaaccagcggcaaaccggttcaggtaaatggtacccgatccgcttgctgctggcgtggccaccgtaaggtgttgtacttgaattggctgaatgacgaatgtgacacggcgagcatctccgattggaggggacacggtgcggcacctacggggtctgaaatttggaccacgatggactctctcgaatgcagacgctcttaatacccaaagatcacggcacgcgacgcttaacttaggttggccatgagtaacttcgcggtctggcggcgccggggttgtcatggttccgtcctgcgatactttcttcaaaagtgtcagccattcgttccacactagctcgatcccacaaccaaagatatagggagggtgattcggacaataaaagatctttattttcattagatctgtgtgttggttttttgtgtgggatctaggaacccctagtgatggagttggccactccctctctgcgcgctcgctcgctcactgaggccgggcgaccaaaggtcgcccgacgcccgggctttgcccgggcggcctcagtgagcgagcgagcgcgcag

SEQ ID NO: 882 - DNA, 4171 bp, synthetic construct
  source 1..4171: mol_type = other DNA
  misc_feature 1..130: note = 130_bp_AAV2_ITR_-_Left
  misc_feature 139..238: note = mAlb SA
  misc_feature 241..3624: note = 12450 anti-CD63 scFv:GAA
  misc_feature 3631..3906: note = bGH pA
  misc_feature 3907..3937: note = MAZ
  misc_feature 3938..3968: note = MAZ
  misc_feature 3974..4004: note = MAZ
  misc_feature 4005..4035: note = MAZ
  misc_feature 4042..4171: note = 130_bp_AAV2_ITR_-_R
ctgcgcgctcgctcgctcactgaggccgcccgggcaaagcccgggcgtcgggcgacctttggtcgcccggcctcagtgagcgagcgagcgcgcagagagggagtggccaactccatcactaggggttcctagatctcttaggtcagtgaagagaagaacaaaaagcagcatattacagttagttgtcttcatcaatctttaaatatgttgtgtggtttttctctccctgtttccacagttcaggtccagctgcaagagtctggccccaaggtggtcaagccctctgagacactgagcctgacctgcacagtgtctggtggcagcatcagcagctactactggaactggatcagacagagccctggcaaaggcctggaatggattggctacaccaagagaggctacacagactacaaccccagcctgagaagcagagtgaccatctctgaggacaccagcaagaaccagttcagcctgaggatcagctctgtgacagctgctgacacagcagtgtactactgtgcccagatgggctggggcagccatgcctttgatatgtggggccagggcacaatggtggctgtgtccagtgggggctcaggaggaggtggctcaggaggtggaggttcaggaggggagattgtgctgacccagtctcctggcacactgtctctgagccctggggaaagagccacactgagctgtagagccagccagtctgtgtcctctagctacctggcctggtatcagcagaagcctggacaggctcccagactgctgatctatggggcctcttctagagccacaggcatccctgacagattcagtggcagtggctctggcacagacttcaccctgaccatcagcagactggaacctgaggactttgctgtgtactattgccagcagtatggcagcagcccctggacatttggacagggcaccaaggtggaaatcaaaggtggtggtggctctgcccatcctggcagacctagagctgtgcccacacagtgtgatgtgcctccaaacagcagatttgactgtgcccctgacaaggccatcacacaagagcagtgtgaagccagaggctgctgttacatccctgccaagcaaggactgcaaggggctcagatgggacagccctggtgcttcttcccaccatcttaccccagctacaagctggaaaacctgagcagctctgagatgggctacactgctacactgaccagaaccacacctacattcttcccaaaggacatcctgacactgaggctggatgtgatgatggaaacagagaacaggctgcacttcaccatcaaggaccctgccaatagaagatatgaggtgcccctggaaacccctcatgtgcactctagagccccatctccactgtactctgtggaattttctgaggaaccctttggggtcatagtcagaaggcagctggatggcagagtgctgctgaacacaactgtggcccctctgttctttgctgatcagttcctgcagctgagcaccagcctgcctagccagtatatcacaggcctggcagagcacctgtctccactgatgctgagcacatcctggaccagaatcaccctgtggaacagagacctggctcccacacctggggccaacctgtatggctctcaccccttctatctggccctggaagatggtggttcagcccatggtgtctttctgctgaactccaatgccatggatgtggtgctgcagccctctcctgctctgtcttggagaagcactggtggcatcctggatgtgtacatctttctgggccctgagcctaagtctgtggtgcagcagtacctggatgttgtgggctaccccttcatgcctccttattggggcctgggcttccacctgtgcagatggggatacagcagcacagccatcaccagacaggttgtggaaaacatgaccagagcacacttcccactggatgtgcagtggaatgacctggactacatggacagcagaagggacttcaccttcaacaaggatggcttcagagacttccctgccatggtgcaagagctgcaccaaggtggtagaagatatatgatgattgtggacccagccatcagctcctctggaccagctggcagctacagaccctatgatgagggactgagaagaggggtgttcatcaccaatgagacaggccagcctctgattggcaaagtgtggccaggctccacagcctttccagatttcacaaaccccacagctctggcttggtgggaagatatggtggcagagttccatgatcaggtgccctttgatggcatgtggattgacatgaatgagcccagcaacttcatcaggggctctgaggatggatgccccaacaatgaactggaaaatcctccttatgtgcctggtgttgttggagggacactgcaggcagccacaatttgtgccagctctcaccagtttctgagcacccactacaacctgcacaatctgtatggcctgactgaggccattgccagccacagggctcttgtgaaggctagaggcaccagaccttttgtgatcagcaggtccacctttgctggccatggcagatatgctggccactggactggggatgtgtggtctagttgggagcagctggctagctctgtgcctgagatcctgcagttcaacctgctgggagtgccccttgttggagcagatgtgtgtggcttcctgggcaacacctcagaggaactgtgtgtcagatggactcagctgggagcattctaccctttcatgagaaaccacaacagcctgctgagcctgcctcaagagccttacagcttttctgagccagcacagcaggccatgagaaaggccctgactctgagatatgccctgctgcctcacctgtacaccctgttccatcaggctcatgtggctggggagactgtggctagacccctgttcctggaattccccaaggacagctccacctggacagtggatcatcagctgctgtggggagaagccctgctgattacacctgtgctgcaggctggcaaggctgaagtgacaggctacttccctcttggcacttggtatgacctgcagacagtgcctgtggaagctctgggatctctgcctccacctcctgctgctcctagagagcctgccattcactctgaaggccagtgggttaccctgcctgctccactggataccatcaatgtgcatctgagagcaggctacatcatccctctgcaaggccctggcctgaccaccacagaatctagacagcagccaatggcactggctgtggccctgaccaaaggtggagaagctagaggggagctgttctgggatgatggggagagcctggaagtgctggaaagaggggcctatacacaagtgatttttctggctaggaacaataccattgtgaatgagcttgtcagagtcacctctgaaggtgctggcctgcagctccagaaagtgacagtgcttggagtggccacagcaccccagcaagtgctgtctaatggggtgccagtgtccaacttcacatacagccctgataccaaggtcctggacatctgtgtgtccctgcttatgggagagcagttcctggtgtcttggtgctaataacctctactgtgccttctagttgccagccatctgttgtttgcccctcccccttgccttccttgaccctggaaggtgccactcccactgtcctttcctaataaaatgaggaaattgcatcacattgtctgagtaggtgtcattctattctggggggtggggtggggcaggacagcaagggggaggattgggaagacaatagcaggcatgctggggatgcagtgggctctatggcttctgaggtggaaagaaccagctggggctctagggggtatccccctggccttgggggagggggaggccagaatgactggccttgggggagggggaggccagaatgagttgactggccttgggggagggggaggccagaatgactggccttgggggagggggaggccagaatgaagatctaggaacccctagtgatggagttggccactccctctctgcgcgctcgctcgctcactgaggccgggcgaccaaaggtcgcccgacgcccgggctttgcccgggcggcctcagtgagcgagcgagcgcgcag

SEQ ID NO: 883 - DNA, 4122 bp, synthetic construct
  source 1..4122: mol_type = other DNA
  misc_feature 1..130: note = 130_bp_AAV2_ITR_-_Left
  misc_feature 139..238: note = mAlb SA
  misc_feature 241..3624: note = 12450 anti-CD63 scFv:GAA
  misc_feature 3631..3857: note = SV40 polyA
  misc_feature 3858..3888: note = MAZ
  misc_feature 3889..3919: note = MAZ
  misc_feature 3925..3955: note = MAZ
  misc_feature 3956..3986: note = MAZ
  misc_feature 3993..4122: note = 130_bp_AAV2_ITR_-_R
ctgcgcgctcgctcgctcactgaggccgcccgggcaaagcccgggcgtcgggcgacctttggtcgcccggcctcagtgagcgagcgagcgcgcagagagggagtggccaactccatcactaggggttcctagatctcttaggtcagtgaagagaagaacaaaaagcagcatattacagttagttgtcttcatcaatctttaaatatgttgtgtggtttttctctccctgtttccacagttcaggtccagctgcaagagtctggccccaaggtggtcaagccctctgagacactgagcctgacctgcacagtgtctggtggcagcatcagcagctactactggaactggatcagacagagccctggcaaaggcctggaatggattggctacaccaagagaggctacacagactacaaccccagcctgagaagcagagtgaccatctctgaggacaccagcaagaaccagttcagcctgaggatcagctctgtgacagctgctgacacagcagtgtactactgtgcccagatgggctggggcagccatgcctttgatatgtggggccagggcacaatggtggctgtgtccagtgggggctcaggaggaggtggctcaggaggtggaggttcaggaggggagattgtgctgacccagtctcctggcacactgtctctgagccctggggaaagagccacactgagctgtagagccagccagtctgtgtcctctagctacctggcctggtatcagcagaagcctggacaggctcccagactgctgatctatggggcctcttctagagccacaggcatccctgacagattcagtggcagtggctctggcacagacttcaccctgaccatcagcagactggaacctgaggactttgctgtgtactattgccagcagtatggcagcagcccctggacatttggacagggcaccaaggtggaaatcaaaggtggtggtggctctgcccatcctggcagacctagagctgtgcccacacagtgtgatgtgcctccaaacagcagatttgactgtgcccctgacaaggccatcacacaagagcagtgtgaagccagaggctgctgttacatccctgccaagcaaggactgcaaggggctcagatgggacagccctggtgcttcttcccaccatcttaccccagctacaagctggaaaacctgagcagctctgagatgggctacactgctacactgaccagaaccacacctacattcttcccaaaggacatcctgacactgaggctggatgtgatgatggaaacagagaacaggctgcacttcaccatcaaggaccctgccaatagaagatatgaggtgcccctggaaacccctcatgtgcactctagagccccatctccactgtactctgtggaattttctgaggaaccctttggggtcatagtcagaaggcagctggatggcagagtgctgctgaacacaactgtggcccctctgttctttgctgatcagttcctgcagctgagcaccagcctgcctagccagtatatcacaggcctggcagagcacctgtctccactgatgctgagcacatcctggaccagaatcaccctgtggaacagagacctggctcccacacctggggccaacctgtatggctctcaccccttctatctggccctggaagatggtggttcagcccatggtgtctttctgctgaactccaatgccatggatgtggtgctgcagccctctcctgctctgtcttggagaagcactggtggcatcctggatgtgtacatctttctgggccctgagcctaagtctgtggtgcagcagtacctggatgttgtgggctaccccttcatgcctccttattggggcctgggcttccacctgtgcagatggggatacagcagcacagccatcaccagacaggttgtggaaaacatgaccagagcacacttcccactggatgtgcagtggaatgacctggactacatggacagcagaagggacttcaccttcaacaaggatggcttcagagacttccctgccatggtgcaagagctgcaccaaggtggtagaagatatatgatgattgtggacccagccatcagctcctctggaccagctggcagctacagaccctatgatgagggactgagaagaggggtgttcatcaccaatgagacaggccagcctctgattggcaaagtgtggccaggctccacagcctttccagatttcacaaaccccacagctctggcttggtgggaagatatggtggcagagttccatgatcaggtgccctttgatggcatgtggattgacatgaatgagcccagcaacttcatcaggggctctgaggatggatgccccaacaatgaactggaaaatcctccttatgtgcctggtgttgttggagggacactgcaggcagccacaatttgtgccagctctcaccagtttctgagcacccactacaacctgcacaatctgtatggcctgactgaggccattgccagccacagggctcttgtgaaggctagaggcaccagaccttttgtgatcagcaggtccacctttgctggccatggcagatatgctggccactggactggggatgtgtggtctagttgggagcagctggctagctctgtgcctgagatcctgcagttcaacctgctgggagtgccccttgttggagcagatgtgtgtggcttcctgggcaacacctcagaggaactgtgtgtcagatggactcagctgggagcattctaccctttcatgagaaaccacaacagcctgctgagcctgcctcaagagccttacagcttttctgagccagcacagcaggccatgagaaaggccctgactctgagatatgccctgctgcctcacctgtacaccctgttccatcaggctcatgtggctggggagactgtggctagacccctgttcctggaattccccaaggacagctccacctggacagtggatcatcagctgctgtggggagaagccctgctgattacacctgtgctgcaggctggcaaggctgaagtgacaggctacttccctcttggcacttggtatgacctgcagacagtgcctgtggaagctctgggatctctgcctccacctcctgctgctcctagagagcctgccattcactctgaaggccagtgggttaccctgcctgctccactggataccatcaatgtgcatctgagagcaggctacatcatccctctgcaaggccctggcctgaccaccacagaatctagacagcagccaatggcactggctgtggccctgaccaaaggtggagaagctagaggggagctgttctgggatgatggggagagcctggaagtgctggaaagaggggcctatacacaagtgatttttctggctaggaacaataccattgtgaatgagcttgtcagagtcacctctgaaggtgctggcctgcagctccagaaagtgacagtgcttggagtggccacagcaccccagcaagtgctgtctaatggggtgccagtgtccaacttcacatacagccctgataccaaggtcctggacatctgtgtgtccctgcttatgggagagcagttcctggtgtcttggtgctaataatcagccataccacatttgtagaggttttacttgctttaaaaaacctcccacacctccccctgaacctgaaacataaaatgaatgcaattgttgttgttaacttgtttattgcagcttataatggttacaaataaagcaatagcatcacaaatttcacaaataaagcatttttttcactgcattctagttgtggtttgtccaaactcatcaatgtatcttatcatgtcctggccttgggggagggggaggccagaatgactggccttgggggagggggaggccagaatgagttgactggccttgggggagggggaggccagaatgactggccttgggggagggggaggccagaatgaagatctaggaacccctagtgatggagttggccactccctctctgcgcgctcgctcgctcactgaggccgggcgaccaaaggtcgcccgacgcccgggctttgcccgggcggcctcagtgagcgagcgagcgcgcag

SEQ ID NO: 884 - DNA, 4270 bp, synthetic construct
  source 1..4270: mol_type = other DNA
  misc_feature 1..130: note = 130bp AAV2 ITR L
  misc_feature 139..238: note = mAlb SA
  misc_feature 241..3624: note = 12450 anti-CD63 scFv:GAA
  misc_feature 3631..3906: note = bGH pA
  misc_feature 3908..4134: note = SV40 late polyA
  misc_feature 4141..4270: note = 130bp AAV2 ITR R
ctgcgcgctcgctcgctcactgaggccgcccgggcaaagcccgggcgtcgggcgacctttggtcgcccggcctcagtgagcgagcgagcgcgcagagagggagtggccaactccatcactaggggttcctagatctcttaggtcagtgaagagaagaacaaaaagcagcatattacagttagttgtcttcatcaatctttaaatatgttgtgtggtttttctctccctgtttccacagttcaagtccagctgcaagagtctggccccaaggtggtcaagccctctgagacactgagcctgacctgcacagtgtctggtggcagcatcagcagctactactggaactggatcagacagagccctggcaaaggactggaatggattggctacaccaagagaggctacacagactacaaccccagcctgagaagcagagtgaccatctctgaggacaccagcaagaaccagttcagcctgaggatcagctctgtgacagctgctgacacagcagtttactactgtgcccagatgggctggggcagccatgcctttgatatgtggggccagggcacaatggtggctgtgtccagtgggggctcaggaggaggtggctcaggaggtggaggttcaggaggggagattgtgctgacccagtctcctggcacactgtctctgagccctggggaaagagccacactgagctgtagagccagccagtctgtgtcctctagctacctggcctggtatcagcagaagcctggacaggctcccagactgctgatctatggggcctcttctagagccacaggcatccctgacagattcagtggcagtggctctggcacagacttcaccctgaccatcagcagactggaacctgaggactttgctgtgtactattgccagcagtatggcagcagcccctggacatttggacagggcaccaaggtggaaatcaaagggggtggtggctctgcccatcctggcagacctagagctgtgcccacacagtgtgatgtgcctccaaacagcagatttgactgtgcccctgacaaggccatcacacaagagcagtgtgaagccagaggctgctgttacatccctgccaagcaaggactgcaaggggctcagatgggacagccctggtgcttcttcccaccatcttaccccagctacaagctggaaaacctgagcagctctgagatgggctacactgctacactgaccagaaccacacctacattcttcccaaaggacatcctgacactgaggctggatgtgatgatggaaacagagaacaggctgcacttcaccatcaaggaccctgccaatagaagatatgaggtgcccctggaaacccctcatgtgcactctagagccccatctccactgtactctgtggaattttctgaggaaccctttggggtcatagtcagaaggcagctggatggcagagtgctgctgaacacaactgtggcccctctgttctttgctgatcagttcctgcagctgagcaccagcctgcctagccagtatatcacaggcctggcagagcacctgtctccactgatgctgagcacatcctggaccagaatcaccctgtggaacagagacctggctcccacacctggggccaacctgtatggctctcaccccttctatctggccctggaagatggtggttcagcccatggtgtctttctgctgaactccaatgccatggatgtggtgctgcagccctctcctgctctgtcttggagaagcactggtggcatcctggatgtgtacatctttctgggccctgagcctaagtctgtggtgcagcagtacctggatgttgtgggctaccccttcatgcctccttattggggcctgggcttccacctgtgcagatggggatacagcagcacagccatcaccagacaggttgtggaaaacatgaccagagcacacttcccactggatgtgcagtggaatgacctggactacatggacagcagaagggacttcaccttcaacaaggatggcttcagagacttccctgccatggtgcaagagctgcaccaagggggcagaagatatatgatgattgtggacccagccatcagctcctctggaccagctggcagctacagaccctatgatgagggactgagaagaggggtgttcatcaccaatgagacaggccagcctctgattggcaaagtgtggccaggctccacagcctttccagatttcacaaaccccacagctctggcttggtgggaagatatggtggcagagttccatgatcaggtgccctttgatggcatgtggattgacatgaatgagcccagcaacttcatcaggggctctgaggatggatgccccaacaatgaactggaaaatcctccttatgtgcctggtgttgttggagggacactgcaggcagccacaatttgtgccagctctcaccagtttctgagcacccactacaacctgcacaatctgtatggcctgactgaggccattgccagccacagggctcttgtgaaggctagaggcaccagaccttttgtgatcagcaggtccacctttgctggccatggcagatatgctggccactggactggggatgtgtggtctagttgggagcagctggctagctctgtgcctgagatcctgcagttcaacctgctgggagtgccccttgttggagcagatgtgtgtggcttcctgggcaacacctcagaggaactgtgtgtcagatggactcagctgggagcattctaccctttcatgagaaaccacaacagcctgctgagcctgcctcaagagccttacagcttttctgagccagcacagcaggccatgagaaaggccctgactctgagatatgccctgctgcctcacctgtacaccctgttccatcaggctcatgtggctggggagactgtggctagacccctgttcctggaattccccaaggacagctccacctggacagtggatcatcagctgctgtggggagaagccctgctgattacacctgtgctgcaggctggcaaggctgaagtgacaggctacttccctcttggcacttggtatgacctgcagacagtgcctgtggaagctctgggatctctgcctccacctcctgctgctcctagagagcctgccattcactctgaaggccagtgggttaccctgcctgctccactggataccatcaatgtgcatctgagagcaggctacatcatccctctgcaaggccctggcctgaccaccacagaatctagacagcagccaatggcactggctgtggccctgaccaaagggggagaagctagaggggagctgttctgggatgatggggagagcctggaagtgctggaaagaggggcctatacacaagtgatttttctggctaggaacaataccattgtgaatgagcttgtcagagtcacctctgaaggtgctggcctgcagctccagaaagtgacagtgcttggagtggccacagcaccccagcaagtgctgtctaatggggtgccagtgtccaacttcacatacagccctgataccaaggtcctggacatctgtgtgtccctgcttatgggagagcagttcctggtgtcttggtgctaataacctctactgtgccttctagttgccagccatctgttgtttgcccctcccccttgccttccttgaccctggaaggtgccactcccactgtcctttcctaataaaatgaggaaattgcatcacattgtctgagtaggtgtcattctattctggggggtggggtggggcaggacagcaagggggaggattgggaagacaatagcaggcatgctggggatgcagtgggctctatggcttctgaggtggaaagaaccagctggggctctagggggtatccccagacatgataagatacattgatgagtttggacaaaccacaactagaatgcagtgaaaaaaatgcttgatttgtgaaatttgtgatgctattgcttgatttgtaaccattataagctgcaataaacaagttaacaacaacaattgcattcattttatgtttcaggttcagggggaggtgtgggaggttttttaaagcaagtaaaacctctacaaatgtggtatggctgaagatctaggaacccctagtgatggagttggccactccctctctgcgcgctcgctcgctcactgaggccgggcgaccaaaggtcgcccgacgcccgggctttgcccgggcggcctcagtgagcgagcgagcgcgcag

SEQ ID NO: 885 - DNA, 4042 bp, synthetic construct
  source 1..4042: mol_type = other DNA
  misc_feature 1..130: note = 130bp AAV2 ITR L
  misc_feature 139..238: note = mAlb SA
  misc_feature 241..3624: note = 12450 anti-CD63 scFv:GAA
  misc_feature 3631..3906: note = bGH pA
  misc_feature 3913..4042: note = 130bp AAV2 ITR R
ctgcgcgctcgctcgctcactgaggccgcccgggcaaagcccgggcgtcgggcgacctttggtcgcccggcctcagtgagcgagcgagcgcgcagagagggagtggccaactccatcactaggggttcctagatctcttaggtcagtgaagagaagaacaaaaagcagcatattacagttagttgtcttcatcaatctttaaatatgttgtgtggtttttctctccctgtttccacagttcaagtccagctgcaagagtctggccccaaggtggtcaagccctctgagacactgagcctgacctgcacagtgtctggtggcagcatcagcagctactactggaactggatcagacagagccctggcaaaggactggaatggattggctacaccaagagaggctacacagactacaaccccagcctgagaagcagagtgaccatctctgaggacaccagcaagaaccagttcagcctgaggatcagctctgtgacagctgctgacacagcagtttactactgtgcccagatgggctggggcagccatgcctttgatatgtggggccagggcacaatggtggctgtgtccagtgggggctcaggaggaggtggctcaggaggtggaggttcaggaggggagattgtgctgacccagtctcctggcacactgtctctgagccctggggaaagagccacactgagctgtagagccagccagtctgtgtcctctagctacctggcctggtatcagcagaagcctggacaggctcccagactgctgatctatggggcctcttctagagccacaggcatccctgacagattcagtggcagtggctctggcacagacttcaccctgaccatcagcagactggaacctgaggactttgctgtgtactattgccagcagtatggcagcagcccctggacatttggacagggcaccaaggtggaaatcaaagggggtggtggctctgcccatcctggcagacctagagctgtgcccacacagtgtgatgtgcctccaaacagcagatttgactgtgcccctgacaaggccatcacacaagagcagtgtgaagccagaggctgctgttacatccctgccaagcaaggactgcaaggggctcagatgggacagccctggtgcttcttcccaccatcttaccccagctacaagctggaaaacctgagcagctctgagatgggctacactgctacactgaccagaaccacacctacattcttcccaaaggacatcctgacactgaggctggatgtgatgatggaaacagagaacaggctgcacttcaccatcaaggaccctgccaatagaagatatgaggtgcccctggaaacccctcatgtgcactctagagccccatctccactgtactctgtggaattttctgaggaaccctttggggtcatagtcagaaggcagctggatggcagagtgctgctgaacacaactgtggcccctctgttctttgctgatcagttcctgcagctgagcaccagcctgcctagccagtatatcacaggcctggcagagcacctgtctccactgatgctgagcacatcctggaccagaatcaccctgtggaacagagacctggctcccacacctggggccaacctgtatggctctcaccccttctatctggccctggaagatggtggttcagcccatggtgtctttctgctgaactccaatgccatggatgtggtgctgcagccctctcctgctctgtcttggagaagcactggtggcatcctggatgtgtacatctttctgggccctgagcctaagtctgtggtgcagcagtacctggatgttgtgggctaccccttcatgcctccttattggggcctgggcttccacctgtgcagatggggatacagcagcacagccatcaccagacaggttgtggaaaacatgaccagagcacacttcccactggatgtgcagtggaatgacctggactacatggacagcagaagggacttcaccttcaacaaggatggcttcagagacttccctgccatggtgcaagagctgcaccaagggggcagaagatatatgatgattgtggacccagccatcagctcctctggaccagctggcagctacagaccctatgatgagggactgagaagaggggtgttcatcaccaatgagacaggccagcctctgattggcaaagtgtggccaggctccacagcctttccagatttcacaaaccccacagctctggcttggtgggaagatatggtggcagagttccatgatcaggtgccctttgatggcatgtggattgacatgaatgagcccagcaacttcatcaggggctctgaggatggatgccccaacaatgaactggaaaatcctccttatgtgcctggtgttgttggagggacactgcaggcagccacaatttgtgccagctctcaccagtttctgagcacccactacaacctgcacaatctgtatggcctgactgaggccattgccagccacagggctcttgtgaaggctagaggcaccagaccttttgtgatcagcaggtccacctttgctggccatggcagatatgctggccactggactggggatgtgtggtctagttgggagcagctggctagctctgtgcctgagatcctgcagttcaacctgctgggagtgccccttgttggagcagatgtgtgtggcttcctgggcaacacctcagaggaactgtgtgtcagatggactcagctgggagcattctaccctttcatgagaaaccacaacagcctgctgagcctgcctcaagagccttacagcttttctgagccagcacagcaggccatgagaaaggccctgactctgagatatgccctgctgcctcacctgtacaccctgttccatcaggctcatgtggctggggagactgtggctagacccctgttcctggaattccccaaggacagctccacctggacagtggatcatcagctgctgtggggagaagccctgctgattacacctgtgctgcaggctggcaaggctgaagtgacaggctacttccctcttggcacttggtatgacctgcagacagtgcctgtggaagctctgggatctctgcctccacctcctgctgctcctagagagcctgccattcactctgaaggccagtgggttaccctgcctgctccactggataccatcaatgtgcatctgagagcaggctacatcatccctctgcaaggccctggcctgaccaccacagaatctagacagcagccaatggcactggctgtggccctgaccaaagggggagaagctagaggggagctgttctgggatgatggggagagcctggaagtgctggaaagaggggcctatacacaagtgatttttctggctaggaacaataccattgtgaatgagcttgtcagagtcacctctgaaggtgctggcctgcagctccagaaagtgacagtgcttggagtggccacagcaccccagcaagtgctgtctaatggggtgccagtgtccaacttcacatacagccctgataccaaggtcctggacatctgtgtgtccctgcttatgggagagcagttcctggtgtcttggtgctaataacctctactgtgccttctagttgccagccatctgttgtttgcccctcccccttgccttccttgaccctggaaggtgccactcccactgtcctttcctaataaaatgaggaaattgcatcacattgtctgagtaggtgtcattctattctggggggtggggtggggcaggacagcaagggggaggattgggaagacaatagcaggcatgctggggatgcagtgggctctatggcttctgaggtggaaagaaccagctggggctctagggggtatccccagatctaggaacccctagtgatggagttggccactccctctctgcgcgctcgctcgctcactgaggccgggcgaccaaaggtcgcccgacgcccgggctttgcccgggcggcctcagtgagcgagcgagcgcgcag

SEQ ID NO: 886 - DNA, 3746 bp, synthetic construct
  source 1..3746: mol_type = other DNA
  misc_feature 1..100: note = mAlb SA
  misc_feature 103..426: note = H1H12847VK
  misc_feature 427..471: note = 3X G4S
  misc_feature 472..834: note = H1H112847VH
  misc_feature 835..864: note = 2X G4S
  misc_feature 865..3513: note = GAA
  misc_feature 3520..3746: note = SV40 polyA
taggtcagtgaagagaagaacaaaaagcagcatattacagttagttgtcttcatcaatctttaaatatgttgtgtggtttttctctccctgtttccacagttgacatccagatgacacagagcccctctagcctgtctgcctctgtgggagacagagtgaccatcacctgtagagccagccagagcatcagcagctacctgaactggtatcagcagaagcctggcaaggcccctaaactgctgatctatgctgccagcagcctgcagtctggggtgccctctagattttctggcagtggctctggcacagacttcaccctgaccataagctccctgcagcctgaggactttgccacctactactgtcagcagagctacagcacccctcctatcacctttggccagggcaccagactggaaatcaaaggtggtggtggaagtggtggtggtggcagtggtggtggtggatctgaagtgcagctggtggaaagtggtggtggcctggttcagcctggcagatccctgagactgagctgtgcagcctctggctttacctttgatgactatgccatgaactgggtcagacaggccccaggcaaaggcctggaatgggtgtcaggcatctcttggtcctctggctccatggactatgctgactctgtgaagggcagattcaccatcagcagagacaatgccaagaacagcctgtacctgcagatgaactccctgagaacagaggacacagccctgtactactgtgccaaggccagagaagtgggagactactatggcatggatgtgtggggccagggaaccacagtgacagtcagtagtggtggtggtggcagtggtggtggtggttctgcccatcctggcagacctagagctgtgcccacacagtgtgatgtgcctccaaacagcagatttgactgtgcccctgacaaggccatcacacaagagcagtgtgaagccagaggctgctgttacatccctgccaagcaaggactgcaaggggctcagatgggacagccctggtgcttcttcccaccatcttaccccagctacaagctggaaaacctgagcagctctgagatgggctacactgctacactgaccagaaccacacctacattcttcccaaaggacatcctgacactgaggctggatgtgatgatggaaacagagaacaggctgcacttcaccatcaaggaccctgccaatagaagatatgaggtgcccctggaaacccctcatgtgcactctagagccccatctccactgtactctgtggaattttctgaggaaccctttggggtcatagtcagaaggcagctggatggcagagtgctgctgaacacaactgtggcccctctgttctttgctgatcagttcctgcagctgagcaccagcctgcctagccagtatatcacaggcctggcagagcacctgtctccactgatgctgagcacatcctggaccagaatcaccctgtggaacagagacctggctcccacacctggggccaacctgtatggctctcaccccttctatctggccctggaagatggtggttcagcccatggtgtctttctgctgaactccaatgccatggatgtggtgctgcagccctctcctgctctgtcttggagaagcactggtggcatcctggatgtgtacatctttctgggccctgagcctaagtctgtggtgcagcagtacctggatgttgtgggctaccccttcatgcctccttattggggcctgggcttccacctgtgcagatggggatacagcagcacagccatcaccagacaggttgtggaaaacatgaccagagcacacttcccactggatgtgcagtggaatgacctggactacatggacagcagaagggacttcaccttcaacaaggatggcttcagagacttccctgccatggtgcaagagctgcaccaaggtggtagaagatatatgatgattgtggacccagccatcagctcctctggaccagctggcagctacagaccctatgatgagggactgagaagaggggtgttcatcaccaatgagacaggccagcctctgattggcaaagtgtggccaggctccacagcctttccagatttcacaaaccccacagctctggcttggtgggaagatatggtggcagagttccatgatcaggtgccctttgatggcatgtggattgacatgaatgagcccagcaacttcatcaggggctctgaggatggatgccccaacaatgaactggaaaatcctccttatgtgcctggtgttgttggagggacactgcaggcagccacaatttgtgccagctctcaccagtttctgagcacccactacaacctgcacaatctgtatggcctgactgaggccattgccagccacagggctcttgtgaaggctagaggcaccagaccttttgtgatcagcaggtccacctttgctggccatggcagatatgctggccactggactggggatgtgtggtctagttgggagcagctggctagctctgtgcctgagatcctgcagttcaacctgctgggagtgccccttgttggagcagatgtgtgtggcttcctgggcaacacctcagaggaactgtgtgtcagatggactcagctgggagcattctaccctttcatgagaaaccacaacagcctgctgagcctgcctcaagagccttacagcttttctgagccagcacagcaggccatgagaaaggccctgactctgagatatgccctgctgcctcacctgtacaccctgttccatcaggctcatgtggctggggagactgtggctagacccctgttcctggaattccccaaggacagctccacctggacagtggatcatcagctgctgtggggagaagccctgctgattacacctgtgctgcaggctggcaaggctgaagtgacaggctacttccctcttggcacttggtatgacctgcagacagtgcctgtggaagctctgggatctctgcctccacctcctgctgctcctagagagcctgccattcactctgaaggccagtgggttaccctgcctgctccactggataccatcaatgtgcatctgagagcaggctacatcatccctctgcaaggccctggcctgaccaccacagaatctagacagcagccaatggcactggctgtggccctgaccaaaggtggagaagctagaggggagctgttctgggatgatggggagagcctggaagtgctggaaagaggggcctatacacaagtgatttttctggctaggaacaataccattgtgaatgagcttgtcagagtcacctctgaaggtgctggcctgcagctccagaaagtgacagtgcttggagtggccacagcaccccagcaagtgctgtctaatggggtgccagtgtccaacttcacatacagccctgataccaaggtcctggacatctgtgtgtccctgcttatgggagagcagttcctggtgtcttggtgctaataatcagccataccacatttgtagaggttttacttgctttaaaaaacctcccacacctccccctgaacctgaaacataaaatgaatgcaattgttgttgttaacttgtttattgcagcttataatggttacaaataaagcaatagcatcacaaatttcacaaataaagcatttttttcactgcattctagttgtggtttgtccaaactcatcaatgtatcttatcatgtc

SEQ ID NO: 887 - DNA, 4023 bp, synthetic construct
  source 1..4023: mol_type = other DNA
  misc_feature 1..100: note = mAlb_SA
  misc_feature 103..426: note = H1H12847 VK
  misc_feature 427..471: note = 3xG4S
  misc_feature 472..834: note = H1H12847 VH
  misc_feature 835..864: note = 2xG4S
  misc_feature 865..3513: note = GAA (70-952)
  misc_feature 3520..3795: note = bGH pA
  misc_feature 3797..4023: note = SV40_late_polyA
taggtcagtgaagagaagaacaaaaagcagcatattacagttagttgtcttcatcaatctttaaatatgttgtgtggtttttctctccctgtttccacagttgacatccagatgacccagagccccagctccctgtcagccagtgtgggtgacagagtgaccatcacctgcagagccagccagagcatcagcagctacctgaactggtaccagcagaaacctggcaaagcccccaagctgctgatttatgctgctagcagcctgcagagtggagtgcccagcagattctcaggcagtggctctggcacagacttcaccctgaccatctccagcctgcagccagaagactttgccacctactactgccagcagagctacagcacccctcctatcacctttggccagggcacaagactggagatcaagggaggaggaggctctggaggaggaggctctggagggggaggctctgaggtccaactggttgaatctggagggggcctggtgcaacctggcaggagcctgagactgagctgtgctgcctctggcttcacctttgatgactatgccatgaactgggtgagacaggcccctggcaagggcctggagtgggtgtctggcatcagctggagctctggcagcatggactatgcagattctgtgaagggcaggttcaccatcagcagagataatgccaagaacagcctgtacctgcagatgaacagcctcaggacagaggacacagccctgtactactgtgccaaggccagagaagtgggtgactactatggcatggatgtgtggggccagggcaccacagtgacagtgagctctgggggaggaggctcaggtgggggtggcagtgcccatcctggcagacctagagctgtgcccacacagtgtgatgtgcctccaaacagcagatttgactgtgcccctgacaaggccatcacacaagagcagtgtgaagccagaggctgctgttacatccctgccaagcaaggactgcaaggggctcagatgggacagccctggtgcttcttcccaccatcttaccccagctacaagctggaaaacctgagcagctctgagatgggctacactgctacactgaccagaaccacacctacattcttcccaaaggacatcctgacactgaggctggatgtgatgatggaaacagagaacaggctgcacttcaccatcaaggaccctgccaatagaagatatgaggtgcccctggaaacccctcatgtgcactctagagccccatctccactgtactctgtggaattttctgaggaaccctttggggtcatagtcagaaggcagctggatggcagagtgctgctgaacacaactgtggcccctctgttctttgctgatcagttcctgcagctgagcaccagcctgcctagccagtatatcacaggcctggcagagcacctgtctccactgatgctgagcacatcctggaccagaatcaccctgtggaacagagacctggctcccacacctggggccaacctgtatggctctcaccccttctatctggccctggaagatggtggttcagcccatggtgtctttctgctgaactccaatgccatggatgtggtgctgcagccctctcctgctctgtcttggagaagcactggtggcatcctggatgtgtacatctttctgggccctgagcctaagtctgtggtgcagcagtacctggatgttgtgggctaccccttcatgcctccttattggggcctgggcttccacctgtgcagatggggatacagcagcacagccatcaccagacaggttgtggaaaacatgaccagagcacacttcccactggatgtgcagtggaatgacctggactacatggacagcagaagggacttcaccttcaacaaggatggcttcagagacttccctgccatggtgcaagagctgcaccaagggggcagaagatatatgatgattgtggacccagccatcagctcctctggaccagctggcagctacagaccctatgatgagggactgagaagaggggtgttcatcaccaatgagacaggccagcctctgattggcaaagtgtggccaggctccacagcctttccagatttcacaaaccccacagctctggcttggtgggaagatatggtggcagagttccatgatcaggtgccctttgatggcatgtggattgacatgaatgagcccagcaacttcatcaggggctctgaggatggatgccccaacaatgaactggaaaatcctccttatgtgcctggtgttgttggagggacactgcaggcagccacaatttgtgccagctctcaccagtttctgagcacccactacaacctgcacaatctgtatggcctgactgaggccattgccagccacagggctcttgtgaaggctagaggcaccagaccttttgtgatcagcaggtccacctttgctggccatggcagatatgctggccactggactggggatgtgtggtctagttgggagcagctggctagctctgtgcctgagatcctgcagttcaacctgctgggagtgccccttgttggagcagatgtgtgtggcttcctgggcaacacctcagaggaactgtgtgtcagatggactcagctgggagcattctaccctttcatgagaaaccacaacagcctgctgagcctgcctcaagagccttacagcttttctgagccagcacagcaggccatgagaaaggccctgactctgagatatgccctgctgcctcacctgtacaccctgttccatcaggctcatgtggctggggagactgtggctagacccctgttcctggaattccccaaggacagctccacctggacagtggatcatcagctgctgtggggagaagccctgctgattacacctgtgctgcaggctggcaaggctgaagtgacaggctacttccctcttggcacttggtatgacctgcagacagtgcctgtggaagctctgggatctctgcctccacctcctgctgctcctagagagcctgccattcactctgaaggccagtgggttaccctgcctgctccactggataccatcaatgtgcatctgagagcaggctacatcatccctctgcaaggccctggcctgaccaccacagaatctagacagcagccaatggcactggctgtggccctgaccaaagggggagaagctagaggggagctgttctgggatgatggggagagcctggaagtgctggaaagaggggcctatacacaagtgatttttctggctaggaacaataccattgtgaatgagcttgtcagagtcacctctgaaggtgctggcctgcagctccagaaagtgacagtgcttggagtggccacagcaccccagcaagtgctgtctaatggggtgccagtgtccaacttcacatacagccctgataccaaggtcctggacatctgtgtgtccctgcttatgggagagcagttcctggtgtcttggtgctaataacctctactgtgccttctagttgccagccatctgttgtttgcccctcccccttgccttccttgaccctggaaggtgccactcccactgtcctttcctaataaaatgaggaaattgcatcacattgtctgagtaggtgtcattctattctggggggtggggtggggcaggacagcaagggggaggattgggaagacaatagcaggcatgctggggatgcagtgggctctatggcttctgaggtggaaagaaccagctggggctctagggggtatccccagacatgataagatacattgatgagtttggacaaaccacaactagaatgcagtgaaaaaaatgcttgatttgtgaaatttgtgatgctattgcttgatttgtaaccattataagctgcaataaacaagttaacaacaacaattgcattcattttatgtttcaggttcagggggaggtgtgggaggttttttaaagcaagtaaaacctctacaaatgtggtatggctga

SEQ ID NO: 888 - DNA, 3795 bp, synthetic construct
  source 1..3795: mol_type = other DNA
  misc_feature 1..100: note = mAlb_SA
  misc_feature 103..426: note = H1H12847 VK
  misc_feature 427..471: note = 3xG4S
  misc_feature 472..834: note = H1H12847 VH
  misc_feature 835..864: note = 2xG4S
  misc_feature 865..3513: note = GAA (70-952)
  misc_feature 3520..3795: note = bGH pA
taggtcagtgaagagaagaacaaaaagcagcatattacagttagttgtcttcatcaatctttaaatatgttgtgtggtttttctctccctgtttccacagttgacatccagatgacccagagccccagctccctgtcagccagtgtgggtgacagagtgaccatcacctgcagagccagccagagcatcagcagctacctgaactggtaccagcagaaacctggcaaagcccccaagctgctgatttatgctgctagcagcctgcagagtggagtgcccagcagattctcaggcagtggctctggcacagacttcaccctgaccatctccagcctgcagccagaagactttgccacctactactgccagcagagctacagcacccctcctatcacctttggccagggcacaagactggagatcaagggaggaggaggctctggaggaggaggctctggagggggaggctctgaggtccaactggttgaatctggagggggcctggtgcaacctggcaggagcctgagactgagctgtgctgcctctggcttcacctttgatgactatgccatgaactgggtgagacaggcccctggcaagggcctggagtgggtgtctggcatcagctggagctctggcagcatggactatgcagattctgtgaagggcaggttcaccatcagcagagataatgccaagaacagcctgtacctgcagatgaacagcctcaggacagaggacacagccctgtactactgtgccaaggccagagaagtgggtgactactatggcatggatgtgtggggccagggcaccacagtgacagtgagctctgggggaggaggctcaggtgggggtggcagtgcccatcctggcagacctagagctgtgcccacacagtgtgatgtgcctccaaacagcagatttgactgtgcccctgacaaggccatcacacaagagcagtgtgaagccagaggctgctgttacatccctgccaagcaaggactgcaaggggctcagatgggacagccctggtgcttcttcccaccatcttaccccagctacaagctggaaaacctgagcagctctgagatgggctacactgctacactgaccagaaccacacctacattcttcccaaaggacatcctgacactgaggctggatgtgatgatggaaacagagaacaggctgcacttcaccatcaaggaccctgccaatagaagatatgaggtgcccctggaaacccctcatgtgcactctagagccccatctccactgtactctgtggaattttctgaggaaccctttggggtcatagtcagaaggcagctggatggcagagtgctgctgaacacaactgtggcccctctgttctttgctgatcagttcctgcagctgagcaccagcctgcctagccagtatatcacaggcctggcagagcacctgtctccactgatgctgagcacatcctggaccagaatcaccctgtggaacagagacctggctcccacacctggggccaacctgtatggctctcaccccttctatctggccctggaagatggtggttcagcccatggtgtctttctgctgaactccaatgccatggatgtggtgctgcagccctctcctgctctgtcttggagaagcactggtggcatcctggatgtgtacatctttctgggccctgagcctaagtctgtggtgcagcagtacctggatgttgtgggctaccccttcatgcctccttattggggcctgggcttccacctgtgcagatggggatacagcagcacagccatcaccagacaggttgtggaaaacatgaccagagcacacttcccactggatgtgcagtggaatgacctggactacatggacagcagaagggacttcaccttcaacaaggatggcttcagagacttccctgccatggtgcaagagctgcaccaagggggcagaagatatatgatgattgtggacccagccatcagctcctctggaccagctggcagctacagaccctatgatgagggactgagaagaggggtgttcatcaccaatgagacaggccagcctctgattggcaaagtgtggccaggctccacagcctttccagatttcacaaaccccacagctctggcttggtgggaagatatggtggcagagttccatgatcaggtgccctttgatggcatgtggattgacatgaatgagcccagcaacttcatcaggggctctgaggatggatgccccaacaatgaactggaaaatcctccttatgtgcctggtgttgttggagggacactgcaggcagccacaatttgtgccagctctcaccagtttctgagcacccactacaacctgcacaatctgtatggcctgactgaggccattgccagccacagggctcttgtgaaggctagaggcaccagaccttttgtgatcagcaggtccacctttgctggccatggcagatatgctggccactggactggggatgtgtggtctagttgggagcagctggctagctctgtgcctgagatcctgcagttcaacctgctgggagtgccccttgttggagcagatgtgtgtggcttcctgggcaacacctcagaggaactgtgtgtcagatggactcagctgggagcattctaccctttcatgagaaaccacaacagcctgctgagcctgcctcaagagccttacagcttttctgagccagcacagcaggccatgagaaaggccctgactctgagatatgccctgctgcctcacctgtacaccctgttccatcaggctcatgtggctggggagactgtggctagacccctgttcctggaattccccaaggacagctccacctggacagtggatcatcagctgctgtggggagaagccctgctgattacacctgtgctgcaggctggcaaggctgaagtgacaggctacttccctcttggcacttggtatgacctgcagacagtgcctgtggaagctctgggatctctgcctccacctcctgctgctcctagagagcctgccattcactctgaaggccagtgggttaccctgcctgctccactggataccatcaatgtgcatctgagagcaggctacatcatccctctgcaaggccctggcctgaccaccacagaatctagacagcagccaatggcactggctgtggccctgaccaaagggggagaagctagaggggagctgttctgggatgatggggagagcctggaagtgctggaaagaggggcctatacacaagtgatttttctggctaggaacaataccattgtgaatgagcttgtcagagtcacctctgaaggtgctggcctgcagctccagaaagtgacagtgcttggagtggccacagcaccccagcaagtgctgtctaatggggtgccagtgtccaacttcacatacagccctgataccaaggtcctggacatctgtgtgtccctgcttatgggagagcagttcctggtgtcttggtgctaataacctctactgtgccttctagttgccagccatctgttgtttgcccctcccccttgccttccttgaccctggaaggtgccactcccactgtcctttcctaataaaatgaggaaattgcatcacattgtctgagtaggtgtcattctattctggggggtggggtggggcaggacagcaagggggaggattgggaagacaatagcaggcatgctggggatgcagtgggctctatggcttctgaggtggaaagaaccagctggggctctagggggtatcccc

SEQ ID NO: 889 - DNA, 3795 bp, synthetic construct
  source 1..3795: mol_type = other DNA
  misc_feature 1..100: note = mAlb_SA
  misc_feature 103..426: note = H1H12847 VK
  misc_feature 427..471: note = 3xG4S
  misc_feature 472..834: note = H1H12847 VH
  misc_feature 835..864: note = 2xG4S
  misc_feature 865..3513: note = GAA (70-952)
  misc_feature 3520..3795: note = bGH pA
taggtcagtgaagagaagaacaaaaagcagcatattacagttagttgtcttcatcaatctttaaatatgttgtgtggtttttctctccctgtttccacagttgacatccagatgacccagagccccagctccctgtcagccagtgtgggtgacagagtgaccatcacctgcagagccagccagagcatcagcagctacctgaactggtaccagcagaaacctggcaaagcccccaagctgctgatttatgctgctagcagcctgcagagtggagtgcccagcagattctcaggcagtggctctggcacagacttcaccctgaccatctccagcctgcagccagaagactttgccacctactactgccagcagagctacagcacccctcctatcacctttggccagggcacaagactggagatcaagggaggaggaggctctggaggaggaggctctggagggggaggctctgaggtccaactggttgaatctggagggggcctggtgcaacctggcaggagcctgagactgagctgtgctgcctctggcttcacctttgatgactatgccatgaactgggtgagacaggcccctggcaagggcctggagtgggtgtctggcatcagctggagctctggcagcatggactatgcagattctgtgaagggcaggttcaccatcagcagagataatgccaagaacagcctgtacctgcagatgaacagcctcaggacagaggacacagccctgtactactgtgccaaggccagagaagtgggtgactactatggcatggatgtgtggggccagggcaccacagtgacagtgagctctgggggaggaggctcaggtgggggtggcagtgcccatcctggcagacctagagctgtgcccacacagtgtgatgtgcctccaaacagcagatttgactgtgcccctgacaaggccatcacacaagagcagtgtgaagccagaggctgctgttacatccctgccaagcaaggactgcaaggggctcagatgggacagccctggtgcttcttcccaccatcttaccccagctacaagctggaaaacctgagcagctctgagatgggctacactgctacactgaccagaaccacacctacattcttcccaaaggacatcctgacactgaggctggatgtgatgatggaaacagagaacaggctgcacttcaccatcaaggaccctgccaatagaagatatgaggtgcccctggaaacccctcatgtgcactctagagccccatctccactgtactctgtggaattttctgaggaaccctttggggtcatagtcagaaggcagctggatggcagagtgctgctgaacacaactgtggcccctctgttctttgctgatcagttcctgcagctgagcaccagcctgcctagccagtatatcacaggcctggcagagcacctgtctccactgatgctgagcacatcctggaccagaatcaccctgtggaacagagacctggctcccacacctggggccaacctgtatggctctcaccccttctatctggccctggaagatggtggttcagcccatggtgtctttctgctgaactccaatgccatggatgtggtgctgcagccctctcctgctctgtcttggagaagcactggtggcatcctggatgtgtacatctttctgggccctgagcctaagtctgtggtgcagcagtacctggatgttgtgggctaccccttcatgcctccttattggggcctgggcttccacctgtgcagatggggatacagcagcacagccatcaccagacaggttgtggaaaacatgaccagagcacacttcccactggatgtgcagtggaatgacctggactacatggacagcagaagggacttcaccttcaacaaggatggcttcagagacttccctgccatggtgcaagagctgcaccaaggtggtagaagatatatgatgattgtggacccagccatcagctcctctggaccagctggcagctacagaccctatgatgagggactgagaagaggggtgttcatcaccaatgagacaggccagcctctgattggcaaagtgtggccaggctccacagcctttccagatttcacaaaccccacagctctggcttggtgggaagatatggtggcagagttccatgatcaggtgccctttgatggcatgtggattgacatgaatgagcccagcaacttcatcaggggctctgaggatggatgccccaacaatgaactggaaaatcctccttatgtgcctggtgttgttggagggacactgcaggcagccacaatttgtgccagctctcaccagtttctgagcacccactacaacctgcacaatctgtatggcctgactgaggccattgccagccacagggctcttgtgaaggctagaggcaccagaccttttgtgatcagcaggtccacctttgctggccatggcagatatgctggccactggactggggatgtgtggtctagttgggagcagctggctagctctgtgcctgagatcctgcagttcaacctgctgggagtgccccttgttggagcagatgtgtgtggcttcctgggcaacacctcagaggaactgtgtgtcagatggactcagctgggagcattctaccctttcatgagaaaccacaacagcctgctgagcctgcctcaagagccttacagcttttctgagccagcacagcaggccatgagaaaggccctgactctgagatatgccctgctgcctcacctgtacaccctgttccatcaggctcatgtggctggggagactgtggctagacccctgttcctggaattccccaaggacagctccacctggacagtggatcatcagctgctgtggggagaagccctgctgattacacctgtgctgcaggctggcaaggctgaagtgacaggctacttccctcttggcacttggtatgacctgcagacagtgcctgtggaagctctgggatctctgcctccacctcctgctgctcctagagagcctgccattcactctgaaggccagtgggttaccctgcctgctccactggataccatcaatgtgcatctgagagcaggctacatcatccctctgcaaggccctggcctgaccaccacagaatctagacagcagccaatggcactggctgtggccctgaccaaaggtggagaagctagaggggagctgttctgggatgatggggagagcctggaagtgctggaaagaggggcctatacacaagtgatttttctggctaggaacaataccattgtgaatgagcttgtcagagtcacctctgaaggtgctggcctgcagctccagaaagtgacagtgcttggagtggccacagcaccccagcaagtgctgtctaatggggtgccagtgtccaacttcacatacagccctgataccaaggtcctggacatctgtgtgtccctgcttatgggagagcagttcctggtgtcttggtgctaataacctctactgtgccttctagttgccagccatctgttgtttgcccctcccccttgccttccttgaccctggaaggtgccactcccactgtcctttcctaataaaatgaggaaattgcatcacattgtctgagtaggtgtcattctattctggggggtggggtggggcaggacagcaagggggaggattgggaagacaatagcaggcatgctggggatgcagtgggctctatggcttctgaggtggaaagaaccagctggggctctagggggtatcccc

SEQ ID NO: 890 - DNA, 3719 bp, synthetic construct
  source 1..3719: mol_type = other DNA
  misc_feature 1..100: note = mAlb SA
  misc_feature 103..453: note = 12450 VH anti-CD63
  misc_feature 454..498: note = 3X G4S linker
  misc_feature 499..822: note = 3-20 ULC light chain VL
  misc_feature 823..837: note = 1X G4S linker
  misc_feature 838..3486: note = GAA CpG
  misc_feature 3493..3719: note = SV40 polyA
taggtcagtgaagagaagaacaaaaagcagcatattacagttagttgtcttcatcaatctttaaatatgttgtgtggtttttctctccctgtttccacagttcaggtccagctgcaagagtctggccccaaggtggtcaagccctctgagacactgagcctgacctgcacagtgtctggtggcagcatcagcagctactactggaactggatcagacagagccctggcaaaggcctggaatggattggctacaccaagagaggctacacagactacaaccccagcctgagaagcagagtgaccatctctgaggacaccagcaagaaccagttcagcctgaggatcagctctgtgacagctgctgacacagcagtgtactactgtgcccagatgggctggggcagccatgcctttgatatgtggggccagggcacaatggtggctgtgtccagtgggggctcaggaggaggtggctcaggaggtggaggttcaggaggggagattgtgctgacccagtctcctggcacactgtctctgagccctggggaaagagccacactgagctgtagagccagccagtctgtgtcctctagctacctggcctggtatcagcagaagcctggacaggctcccagactgctgatctatggggcctcttctagagccacaggcatccctgacagattcagtggcagtggctctggcacagacttcaccctgaccatcagcagactggaacctgaggactttgctgtgtactattgccagcagtatggcagcagcccctggacatttggacagggcaccaaggtggaaatcaaaggtggtggtggctctgcccatcctggcagacctagagctgtgcccacacagtgtgatgtgcctccaaacagcagatttgactgtgcccctgacaaggccatcacacaagagcagtgtgaagccagaggctgctgttacatccctgccaagcaaggactgcaaggggctcagatgggacagccctggtgcttcttcccaccatcttaccccagctacaagctggaaaacctgagcagctctgagatgggctacactgctacactgaccagaaccacacctacattcttcccaaaggacatcctgacactgaggctggatgtgatgatggaaacagagaacaggctgcacttcaccatcaaggaccctgccaatagaagatatgaggtgcccctggaaacccctcatgtgcactctagagccccatctccactgtactctgtggaattttctgaggaaccctttggggtcatagtcagaaggcagctggatggcagagtgctgctgaacacaactgtggcccctctgttctttgctgatcagttcctgcagctgagcaccagcctgcctagccagtatatcacaggcctggcagagcacctgtctccactgatgctgagcacatcctggaccagaatcaccctgtggaacagagacctggctcccacacctggggccaacctgtatggctctcaccccttctatctggccctggaagatggtggttcagcccatggtgtctttctgctgaactccaatgccatggatgtggtgctgcagccctctcctgctctgtcttggagaagcactggtggcatcctggatgtgtacatctttctgggccctgagcctaagtctgtggtgcagcagtacctggatgttgtgggctaccccttcatgcctccttattggggcctgggcttccacctgtgcagatggggatacagcagcacagccatcaccagacaggttgtggaaaacatgaccagagcacacttcccactggatgtgcagtggaatgacctggactacatggacagcagaagggacttcaccttcaacaaggatggcttcagagacttccctgccatggtgcaagagctgcaccaaggtggtagaagatatatgatgattgtggacccagccatcagctcctctggaccagctggcagctacagaccctatgatgagggactgagaagaggggtgttcatcaccaatgagacaggccagcctctgattggcaaagtgtggccaggctccacagcctttccagatttcacaaaccccacagctctggcttggtgggaagatatggtggcagagttccatgatcaggtgccctttgatggcatgtggattgacatgaatgagcccagcaacttcatcaggggctctgaggatggatgccccaacaatgaactggaaaatcctccttatgtgcctggtgttgttggagggacactgcaggcagccacaatttgtgccagctctcaccagtttctgagcacccactacaacctgcacaatctgtatggcctgactgaggccattgccagccacagggctcttgtgaaggctagaggcaccagaccttttgtgatcagcaggtccacctttgctggccatggcagatatgctggccactggactggggatgtgtggtctagttgggagcagctggctagctctgtgcctgagatcctgcagttcaacctgctgggagtgccccttgttggagcagatgtgtgtggcttcctgggcaacacctcagaggaactgtgtgtcagatggactcagctgggagcattctaccctttcatgagaaaccacaacagcctgctgagcctgcctcaagagccttacagcttttctgagccagcacagcaggccatgagaaaggccctgactctgagatatgccctgctgcctcacctgtacaccctgttccatcaggctcatgtggctggggagactgtggctagacccctgttcctggaattccccaaggacagctccacctggacagtggatcatcagctgctgtggggagaagccctgctgattacacctgtgctgcaggctggcaaggctgaagtgacaggctacttccctcttggcacttggtatgacctgcagacagtgcctgtggaagctctgggatctctgcctccacctcctgctgctcctagagagcctgccattcactctgaaggccagtgggttaccctgcctgctccactggataccatcaatgtgcatctgagagcaggctacatcatccctctgcaaggccctggcctgaccaccacagaatctagacagcagccaatggcactggctgtggccctgaccaaaggtggagaagctagaggggagctgttctgggatgatggggagagcctggaagtgctggaaagaggggcctatacacaagtgatttttctggctaggaacaataccattgtgaatgagcttgtcagagtcacctctgaaggtgctggcctgcagctccagaaagtgacagtgcttggagtggccacagcaccccagcaagtgctgtctaatggggtgccagtgtccaacttcacatacagccctgataccaaggtcctggacatctgtgtgtccctgcttatgggagagcagttcctggtgtcttggtgctaataatcagccataccacatttgtagaggttttacttgctttaaaaaacctcccacacctccccctgaacctgaaacataaaatgaatgcaattgttgttgttaacttgtttattgcagcttataatggttacaaataaagcaatagcatcacaaatttcacaaataaagcatttttttcactgcattctagttgtggtttgtccaaactcatcaatgtatcttatcatgtc

SEQ ID NO: 891 - DNA, 3996 bp, synthetic construct
  source 1..3996: mol_type = other DNA
  misc_feature 1..100: note = mAlb_SA
  misc_feature 103..3486: note = 12450 anti-CD63 scFv:GAA
  misc_feature 3493..3768: note = bGH pA
  misc_feature 3770..3996: note = SV40_late_polyA
taggtcagtgaagagaagaacaaaaagcagcatattacagttagttgtcttcatcaatctttaaatatgttgtgtggtttttctctccctgtttccacagttcaggtccagctgcaagagtctggccccaaggtggtcaagccctctgagacactgagcctgacctgcacagtgtctggtggcagcatcagcagctactactggaactggatcagacagagccctggcaaaggcctggaatggattggctacaccaagagaggctacacagactacaaccccagcctgagaagcagagtgaccatctctgaggacaccagcaagaaccagttcagcctgaggatcagctctgtgacagctgctgacacagcagtttactactgtgcccagatgggctggggcagccatgcctttgatatgtggggccagggcacaatggtggctgtgtccagtgggggctcaggaggaggtggctcaggaggtggaggttcaggaggggagattgtgctgacccagtctcctggcacactgtctctgagccctggggaaagagccacactgagctgtagagccagccagtctgtgtcctctagctacctggcctggtatcagcagaagcctggacaggctcccagactgctgatctatggggcctcttctagagccacaggcatccctgacagattcagtggcagtggctctggcacagacttcaccctgaccatcagcagactggaacctgaggactttgctgtgtactattgccagcagtatggcagcagcccctggacatttggacagggcaccaaggtggaaatcaaagggggtggtggctctgcccatcctggcagacctagagctgtgcccacacagtgtgatgtgcctccaaacagcagatttgactgtgcccctgacaaggccatcacacaagagcagtgtgaagccagaggctgctgttacatccctgccaagcaaggactgcaaggggctcagatgggacagccctggtgcttcttcccaccatcttaccccagctacaagctggaaaacctgagcagctctgagatgggctacactgctacactgaccagaaccacacctacattcttcccaaaggacatcctgacactgaggctggatgtgatgatggaaacagagaacaggctgcacttcaccatcaaggaccctgccaatagaagatatgaggtgcccctggaaacccctcatgtgcactctagagccccatctccactgtactctgtggaattttctgaggaaccctttggggtcatagtcagaaggcagctggatggcagagtgctgctgaacacaactgtggcccctctgttctttgctgatcagttcctgcagctgagcaccagcctgcctagccagtatatcacaggcctggcagagcacctgtctccactgatgctgagcacatcctggaccagaatcaccctgtggaacagagacctggctcccacacctggggccaacctgtatggctctcaccccttctatctggccctggaagatggtggttcagcccatggtgtctttctgctgaactccaatgccatggatgtggtgctgcagccctctcctgctctgtcttggagaagcactggtggcatcctggatgtgtacatctttctgggccctgagcctaagtctgtggtgcagcagtacctggatgttgtgggctaccccttcatgcctccttattggggcctgggcttccacctgtgcagatggggatacagcagcacagccatcaccagacaggttgtggaaaacatgaccagagcacacttcccactggatgtgcagtggaatgacctggactacatggacagcagaagggacttcaccttcaacaaggatggcttcagagacttccctgccatggtgcaagagctgcaccaagggggcagaagatatatgatgattgtggacccagccatcagctcctctggaccagctggcagctacagaccctatgatgagggactgagaagaggggtgttcatcaccaatgagacaggccagcctctgattggcaaagtgtggccaggctccacagcctttccagatttcacaaaccccacagctctggcttggtgggaagatatggtggcagagttccatgatcaggtgccctttgatggcatgtggattgacatgaatgagcccagcaacttcatcaggggctctgaggatggatgccccaacaatgaactggaaaatcctccttatgtgcctggtgttgttggagggacactgcaggcagccacaatttgtgccagctctcaccagtttctgagcacccactacaacctgcacaatctgtatggcctgactgaggccattgccagccacagggctcttgtgaaggctagaggcaccagaccttttgtgatcagcaggtccacctttgctggccatggcagatatgctggccactggactggggatgtgtggtctagttgggagcagctggctagctctgtgcctgagatcctgcagttcaacctgctgggagtgccccttgttggagcagatgtgtgtggcttcctgggcaacacctcagaggaactgtgtgtcagatggactcagctgggagcattctaccctttcatgagaaaccacaacagcctgctgagcctgcctcaagagccttacagcttttctgagccagcacagcaggccatgagaaaggccctgactctgagatatgccctgctgcctcacctgtacaccctgttccatcaggctcatgtggctggggagactgtggctagacccctgttcctggaattccccaaggacagctccacctggacagtggatcatcagctgctgtggggagaagccctgctgattacacctgtgctgcaggctggcaaggctgaagtgacaggctacttccctcttggcacttggtatgacctgcagacagtgcctgtggaagctctgggatctctgcctccacctcctgctgctcctagagagcctgccattcactctgaaggccagtgggttaccctgcctgctccactggataccatcaatgtgcatctgagagcaggctacatcatccctctgcaaggccctggcctgaccaccacagaatctagacagcagccaatggcactggctgtggccctgaccaaagggggagaagctagaggggagctgttctgggatgatggggagagcctggaagtgctggaaagaggggcctatacacaagtgatttttctggctaggaacaataccattgtgaatgagcttgtcagagtcacctctgaaggtgctggcctgcagctccagaaagtgacagtgcttggagtggccacagcaccccagcaagtgctgtctaatggggtgccagtgtccaacttcacatacagccctgataccaaggtcctggacatctgtgtgtccctgcttatgggagagcagttcctggtgtcttggtgctaataacctctactgtgccttctagttgccagccatctgttgtttgcccctcccccttgccttccttgaccctggaaggtgccactcccactgtcctttcctaataaaatgaggaaattgcatcacattgtctgagtaggtgtcattctattctggggggtggggtggggcaggacagcaagggggaggattgggaagacaatagcaggcatgctggggatgcagtgggctctatggcttctgaggtggaaagaaccagctggggctctagggggtatccccagacatgataagatacattgatgagtttggacaaaccacaactagaatgcagtgaaaaaaatgcttgatttgtgaaatttgtgatgctattgcttgatttgtaaccattataagctgcaataaacaagttaacaacaacaattgcattcattttatgtttcaggttcagggggaggtgtgggaggttttttaaagcaagtaaaacctctacaaatgtggtatggctga

SEQ ID NO: 892 - DNA, 3768 bp, synthetic construct
  source 1..3768: mol_type = other DNA
  misc_feature 1..100: note = mAlb SA
  misc_feature 103..3486: note = 12450 anti-CD63 scFv:GAA
  misc_feature 3493..3768: note = bGH pA
taggtcagtgaagagaagaacaaaaagcagcatattacagttagttgtcttcatcaatctttaaatatgttgtgtggtttttctctccctgtttccacagttcaggtccagctgcaagagtctggccccaaggtggtcaagccctctgagacactgagcctgacctgcacagtgtctggtggcagcatcagcagctactactggaactggatcagacagagccctggcaaaggcctggaatggattggctacaccaagagaggctacacagactacaaccccagcctgagaagcagagtgaccatctctgaggacaccagcaagaaccagttcagcctgaggatcagctctgtgacagctgctgacacagcagtttactactgtgcccagatgggctggggcagccatgcctttgatatgtggggccagggcacaatggtggctgtgtccagtgggggctcaggaggaggtggctcaggaggtggaggttcaggaggggagattgtgctgacccagtctcctggcacactgtctctgagccctggggaaagagccacactgagctgtagagccagccagtctgtgtcctctagctacctggcctggtatcagcagaagcctggacaggctcccagactgctgatctatggggcctcttctagagccacaggcatccctgacagattcagtggcagtggctctggcacagacttcaccctgaccatcagcagactggaacctgaggactttgctgtgtactattgccagcagtatggcagcagcccctggacatttggacagggcaccaaggtggaaatcaaagggggtggtggctctgcccatcctggcagacctagagctgtgcccacacagtgtgatgtgcctccaaacagcagatttgactgtgcccctgacaaggccatcacacaagagcagtgtgaagccagaggctgctgttacatccctgccaagcaaggactgcaaggggctcagatgggacagccctggtgcttcttcccaccatcttaccccagctacaagctggaaaacctgagcagctctgagatgggctacactgctacactgaccagaaccacacctacattcttcccaaaggacatcctgacactgaggctggatgtgatgatggaaacagagaacaggctgcacttcaccatcaaggaccctgccaatagaagatatgaggtgcccctggaaacccctcatgtgcactctagagccccatctccactgtactctgtggaattttctgaggaaccctttggggtcatagtcagaaggcagctggatggcagagtgctgctgaacacaactgtggcccctctgttctttgctgatcagttcctgcagctgagcaccagcctgcctagccagtatatcacaggcctggcagagcacctgtctccactgatgctgagcacatcctggaccagaatcaccctgtggaacagagacctggctcccacacctggggccaacctgtatggctctcaccccttctatctggccctggaagatggtggttcagcccatggtgtctttctgctgaactccaatgccatggatgtggtgctgcagccctctcctgctctgtcttggagaagcactggtggcatcctggatgtgtacatctttctgggccctgagcctaagtctgtggtgcagcagtacctggatgttgtgggctaccccttcatgcctccttattggggcctgggcttccacctgtgcagatggggatacagcagcacagccatcaccagacaggttgtggaaaacatgaccagagcacacttcccactggatgtgcagtggaatgacctggactacatggacagcagaagggacttcaccttcaacaaggatggcttcagagacttccctgccatggtgcaagagctgcaccaagggggcagaagatatatgatgattgtggacccagccatcagctcctctggaccagctggcagctacagaccctatgatgagggactgagaagaggggtgttcatcaccaatgagacaggccagcctctgattggcaaagtgtggccaggctccacagcctttccagatttcacaaaccccacagctctggcttggtgggaagatatggtggcagagttccatgatcaggtgccctttgatggcatgtggattgacatgaatgagcccagcaacttcatcaggggctctgaggatggatgccccaacaatgaactggaaaatcctccttatgtgcctggtgttgttggagggacactgcaggcagccacaatttgtgccagctctcaccagtttctgagcacccactacaacctgcacaatctgtatggcctgactgaggccattgccagccacagggctcttgtgaaggctagaggcaccagaccttttgtgatcagcaggtccacctttgctggccatggcagatatgctggccactggactggggatgtgtggtctagttgggagcagctggctagctctgtgcctgagatcctgcagttcaacctgctgggagtgccccttgttggagcagatgtgtgtggcttcctgggcaacacctcagaggaactgtgtgtcagatggactcagctgggagcattctaccctttcatgagaaaccacaacagcctgctgagcctgcctcaagagccttacagcttttctgagccagcacagcaggccatgagaaaggccctgactctgagatatgccctgctgcctcacctgtacaccctgttccatcaggctcatgtggctggggagactgtggctagacccctgttcctggaattccccaaggacagctccacctggacagtggatcatcagctgctgtggggagaagccctgctgattacacctgtgctgcaggctggcaaggctgaagtgacaggctacttccctcttggcacttggtatgacctgcagacagtgcctgtggaagctctgggatctctgcctccacctcctgctgctcctagagagcctgccattcactctgaaggccagtgggttaccctgcctgctccactggataccatcaatgtgcatctgagagcaggctacatcatccctctgcaaggccctggcctgaccaccacagaatctagacagcagccaatggcactggctgtggccctgaccaaagggggagaagctagaggggagctgttctgggatgatggggagagcctggaagtgctggaaagaggggcctatacacaagtgatttttctggctaggaacaataccattgtgaatgagcttgtcagagtcacctctgaaggtgctggcctgcagctccagaaagtgacagtgcttggagtggccacagcaccccagcaagtgctgtctaatggggtgccagtgtccaacttcacatacagccctgataccaaggtcctggacatctgtgtgtccctgcttatgggagagcagttcctggtgtcttggtgctaataacctctactgtgccttctagttgccagccatctgttgtttgcccctcccccttgccttccttgaccctggaaggtgccactcccactgtcctttcctaataaaatgaggaaattgcatcacattgtctgagtaggtgtcattctattctggggggtggggtggggcaggacagcaagggggaggattgggaagacaatagcaggcatgctggggatgcagtgggctctatggcttctgaggtggaaagaaccagctggggctctagggggtatcccc

SEQ ID NO: 893 - DNA, 3995 bp, synthetic construct
  source 1..3995: mol_type = other DNA
  misc_feature 1..100: note = mAlb_SA
  misc_feature 103..3486: note = 12450 anti-CD63 scFv:GAA
  misc_feature 3493..3768: note = bGH_pA
  misc_feature 3769..3995: note = SV40_late_polyA
taggtcagtgaagagaagaacaaaaagcagcatattacagttagttgtcttcatcaatctttaaatatgttgtgtggtttttctctccctgtttccacagttcaggtccagctgcaagagtctggccccaaggtggtcaagccctctgagacactgagcctgacctgcacagtgtctggtggcagcatcagcagctactactggaactggatcagacagagccctggcaaaggcctggaatggattggctacaccaagagaggctacacagactacaaccccagcctgagaagcagagtgaccatctctgaggacaccagcaagaaccagttcagcctgaggatcagctctgtgacagctgctgacacagcagtgtactactgtgcccagatgggctggggcagccatgcctttgatatgtggggccagggcacaatggtggctgtgtccagtgggggctcaggaggaggtggctcaggaggtggaggttcaggaggggagattgtgctgacccagtctcctggcacactgtctctgagccctggggaaagagccacactgagctgtagagccagccagtctgtgtcctctagctacctggcctggtatcagcagaagcctggacaggctcccagactgctgatctatggggcctcttctagagccacaggcatccctgacagattcagtggcagtggctctggcacagacttcaccctgaccatcagcagactggaacctgaggactttgctgtgtactattgccagcagtatggcagcagcccctggacatttggacagggcaccaaggtggaaatcaaaggtggtggtggctctgcccatcctggcagacctagagctgtgcccacacagtgtgatgtgcctccaaacagcagatttgactgtgcccctgacaaggccatcacacaagagcagtgtgaagccagaggctgctgttacatccctgccaagcaaggactgcaaggggctcagatgggacagccctggtgcttcttcccaccatcttaccccagctacaagctggaaaacctgagcagctctgagatgggctacactgctacactgaccagaaccacacctacattcttcccaaaggacatcctgacactgaggctggatgtgatgatggaaacagagaacaggctgcacttcaccatcaaggaccctgccaatagaagatatgaggtgcccctggaaacccctcatgtgcactctagagccccatctccactgtactctgtggaattttctgaggaaccctttggggtcatagtcagaaggcagctggatggcagagtgctgctgaacacaactgtggcccctctgttctttgctgatcagttcctgcagctgagcaccagcctgcctagccagtatatcacaggcctggcagagcacctgtctccactgatgctgagcacatcctggaccagaatcaccctgtggaacagagacctggctcccacacctggggccaacctgtatggctctcaccccttctatctggccctggaagatggtggttcagcccatggtgtctttctgctgaactccaatgccatggatgtggtgctgcagccctctcctgctctgtcttggagaagcactggtggcatcctggatgtgtacatctttctgggccctgagcctaagtctgtggtgcagcagtacctggatgttgtgggctaccccttcatgcctccttattggggcctgggcttccacctgtgcagatggggatacagcagcacagccatcaccagacaggttgtggaaaacatgaccagagcacacttcccactggatgtgcagtggaatgacctggactacatggacagcagaagggacttcaccttcaacaaggatggcttcagagacttccctgccatggtgcaagagctgcaccaaggtggtagaagatatatgatgattgtggacccagccatcagctcctctggaccagctggcagctacagaccctatgatgagggactgagaagaggggtgttcatcaccaatgagacaggccagcctctgattggcaaagtgtggccaggctccacagcctttccagatttcacaaaccccacagctctggcttggtgggaagatatggtggcagagttccatgatcaggtgccctttgatggcatgtggattgacatgaatgagcccagcaacttcatcaggggctctgaggatggatgccccaacaatgaactggaaaatcctccttatgtgcctggtgttgttggagggacactgcaggcagccacaatttgtgccagctctcaccagtttctgagcacccactacaacctgcacaatctgtatggcctgactgaggccattgccagccacagggctcttgtgaaggctagaggcaccagaccttttgtgatcagcaggtccacctttgctggccatggcagatatgctggccactggactggggatgtgtggtctagttgggagcagctggctagctctgtgcctgagatcctgcagttcaacctgctgggagtgccccttgttggagcagatgtgtgtggcttcctgggcaacacctcagaggaactgtgtgtcagatggactcagctgggagcattctaccctttcatgagaaaccacaacagcctgctgagcctgcctcaagagccttacagcttttctgagccagcacagcaggccatgagaaaggccctgactctgagatatgccctgctgcctcacctgtacaccctgttccatcaggctcatgtggctggggagactgtggctagacccctgttcctggaattccccaaggacagctccacctggacagtggatcatcagctgctgtggggagaagccctgctgattacacctgtgctgcaggctggcaaggctgaagtgacaggctacttccctcttggcacttggtatgacctgcagacagtgcctgtggaagctctgggatctctgcctccacctcctgctgctcctagagagcctgccattcactctgaaggccagtgggttaccctgcctgctccactggataccatcaatgtgcatctgagagcaggctacatcatccctctgcaaggccctggcctgaccaccacagaatctagacagcagccaatggcactggctgtggccctgaccaaagggggagaagctagaggggagctgttctgggatgatggggagagcctggaagtgctggaaagaggggcctatacacaagtgatttttctggctaggaacaataccattgtgaatgagcttgtcagagtcacctctgaaggtgctggcctgcagctccagaaagtgacagtgcttggagtggccacagcaccccagcaagtgctgtctaatggggtgccagtgtccaacttcacatacagccctgataccaaggtcctggacatctgtgtgtccctgcttatgggagagcagttcctggtgtcttggtgctaataacctctactgtgccttctagttgccagccatctgttgtttgcccctcccccttgccttccttgaccctggaaggtgccactcccactgtcctttcctaataaaatgaggaaattgcatcacattgtctgagtaggtgtcattctattctggggggtggggtggggcaggacagcaagggggaggattgggaagacaatagcaggcatgctggggatgcagtgggctctatggcttctgaggtggaaagaaccagctggggctctagggggtatccccgacatgataagatacattgatgagtttggacaaaccacaactagaatgcagtgaaaaaaatgcttgatttgtgaaatttgtgatgctattgcttgatttgtaaccattataagctgcaataaacaagttaacaacaacaattgcattcattttatgtttcaggttcagggggaggtgtgggaggttttttaaagcaagtaaaacctctacaaatgtggtatggctga

SEQ ID NO: 894 - DNA, 3768 bp, synthetic construct
  source 1..3768: mol_type = other DNA
  misc_feature 1..100: note = mAlb_SA
  misc_feature 103..3486: note = 12450 anti-CD63 scFv:GAA
  misc_feature 3493..3768: note = bGH_pA
taggtcagtgaagagaagaacaaaaagcagcatattacagttagttgtcttcatcaatctttaaatatgttgtgtggtttttctctccctgtttccacagttcaggtccagctgcaagagtctggccccaaggtggtcaagccctctgagacactgagcctgacctgcacagtgtctggtggcagcatcagcagctactactggaactggatcagacagagccctggcaaaggcctggaatggattggctacaccaagagaggctacacagactacaaccccagcctgagaagcagagtgaccatctctgaggacaccagcaagaaccagttcagcctgaggatcagctctgtgacagctgctgacacagcagtgtactactgtgcccagatgggctggggcagccatgcctttgatatgtggggccagggcacaatggtggctgtgtccagtgggggctcaggaggaggtggctcaggaggtggaggttcaggaggggagattgtgctgacccagtctcctggcacactgtctctgagccctggggaaagagccacactgagctgtagagccagccagtctgtgtcctctagctacctggcctggtatcagcagaagcctggacaggctcccagactgctgatctatggggcctcttctagagccacaggcatccctgacagattcagtggcagtggctctggcacagacttcaccctgaccatcagcagactggaacctgaggactttgctgtgtactattgccagcagtatggcagcagcccctggacatttggacagggcaccaaggtggaaatcaaaggtggtggtggctctgcccatcctggcagacctagagctgtgcccacacagtgtgatgtgcctccaaacagcagatttgactgtgcccctgacaaggccatcacacaagagcagtgtgaagccagaggctgctgttacatccctgccaagcaaggactgcaaggggctcagatgggacagccctggtgcttcttcccaccatcttaccccagctacaagctggaaaacctgagcagctctgagatgggctacactgctacactgaccagaaccacacctacattcttcccaaaggacatcctgacactgaggctggatgtgatgatggaaacagagaacaggctgcacttcaccatcaaggaccctgccaatagaagatatgaggtgcccctggaaacccctcatgtgcactctagagccccatctccactgtactctgtggaattttctgaggaaccctttggggtcatagtcagaaggcagctggatggcagagtgctgctgaacacaactgtggcccctctgttctttgctgatcagttcctgcagctgagcaccagcctgcctagccagtatatcacaggcctggcagagcacctgtctccactgatgctgagcacatcctggaccagaatcaccctgtggaacagagacctggctcccacacctggggccaacctgtatggctctcaccccttctatctggccctggaagatggtggttcagcccatggtgtctttctgctgaactccaatgccatggatgtggtgctgcagccctctcctgctctgtcttggagaagcactggtggcatcctggatgtgtacatctttctgggccctgagcctaagtctgtggtgcagcagtacctggatgttgtgggctaccccttcatgcctccttattggggcctgggcttccacctgtgcagatggggatacagcagcacagccatcaccagacaggttgtggaaaacatgaccagagcacacttcccactggatgtgcagtggaatgacctggactacatggacagcagaagggacttcaccttcaacaaggatggcttcagagacttccctgccatggtgcaagagctgcaccaaggtggtagaagatatatgatgattgtggacccagccatcagctcctctggaccagctggcagctacagaccctatgatgagggactgagaagaggggtgttcatcaccaatgagacaggccagcctctgattggcaaagtgtggccaggctccacagcctttccagatttcacaaaccccacagctctggcttggtgggaagatatggtggcagagttccatgatcaggtgccctttgatggcatgtggattgacatgaatgagcccagcaacttcatcaggggctctgaggatggatgccccaacaatgaactggaaaatcctccttatgtgcctggtgttgttggagggacactgcaggcagccacaatttgtgccagctctcaccagtttctgagcacccactacaacctgcacaatctgtatggcctgactgaggccattgccagccacagggctcttgtgaaggctagaggcaccagaccttttgtgatcagcaggtccacctttgctggccatggcagatatgctggccactggactggggatgtgtggtctagttgggagcagctggctagctctgtgcctgagatcctgcagttcaacctgctgggagtgccccttgttggagcagatgtgtgtggcttcctgggcaacacctcagaggaactgtgtgtcagatggactcagctgggagcattctaccctttcatgagaaaccacaacagcctgctgagcctgcctcaagagccttacagcttttctgagccagcacagcaggccatgagaaaggccctgactctgagatatgccctgctgcctcacctgtacaccctgttccatcaggctcatgtggctggggagactgtggctagacccctgttcctggaattccccaaggacagctccacctggacagtggatcatcagctgctgtggggagaagccctgctgattacacctgtgctgcaggctggcaaggctgaagtgacaggctacttccctcttggcacttggtatgacctgcagacagtgcctgtggaagctctgggatctctgcctccacctcctgctgctcctagagagcctgccattcactctgaaggccagtgggttaccctgcctgctccactggataccatcaatgtgcatctgagagcaggctacatcatccctctgcaaggccctggcctgaccaccacagaatctagacagcagccaatggcactggctgtggccctgaccaaagggggagaagctagaggggagctgttctgggatgatggggagagcctggaagtgctggaaagaggggcctatacacaagtgatttttctggctaggaacaataccattgtgaatgagcttgtcagagtcacctctgaaggtgctggcctgcagctccagaaagtgacagtgcttggagtggccacagcaccccagcaagtgctgtctaatggggtgccagtgtccaacttcacatacagccctgataccaaggtcctggacatctgtgtgtccctgcttatgggagagcagttcctggtgtcttggtgctaataacctctactgtgccttctagttgccagccatctgttgtttgcccctcccccttgccttccttgaccctggaaggtgccactcccactgtcctttcctaataaaatgaggaaattgcatcacattgtctgagtaggtgtcattctattctggggggtggggtggggcaggacagcaagggggaggattgggaagacaatagcaggcatgctggggatgcagtgggctctatggcttctgaggtggaaagaaccagctggggctctagggggtatcccc

SEQ ID NO: 895 - DNA, 3768 bp, synthetic construct
  source 1..3768: mol_type = other DNA
  misc_feature 1..100: note = mAlb_SA
  misc_feature 103..3486: note = 12450 anti-CD63 scFv:GAA
  misc_feature 3493..3768: note = bGH pA
taggtcagtgaagagaagaacaaaaagcagcatattacagttagttgtcttcatcaatctttaaatatgttgtgtggtttttctctccctgtttccacagttcaggtccagctgcaagagtctggccccaaggtggtcaagccctctgagacactgagcctgacctgcacagtgtctggtggcagcatcagcagctactactggaactggatcagacagagccctggcaaaggcctggaatggattggctacaccaagagaggctacacagactacaaccccagcctgagaagcagagtgaccatctctgaggacaccagcaagaaccagttcagcctgaggatcagctctgtgacagctgctgacacagcagtgtactactgtgcccagatgggctggggcagccatgcctttgatatgtggggccagggcacaatggtggctgtgtccagtgggggctcaggaggaggtggctcaggaggtggaggttcaggaggggagattgtgctgacccagtctcctggcacactgtctctgagccctggggaaagagccacactgagctgtagagccagccagtctgtgtcctctagctacctggcctggtatcagcagaagcctggacaggctcccagactgctgatctatggggcctcttctagagccacaggcatccctgacagattcagtggcagtggctctggcacagacttcaccctgaccatcagcagactggaacctgaggactttgctgtgtactattgccagcagtatggcagcagcccctggacatttggacagggcaccaaggtggaaatcaaaggtggtggtggctctgcccatcctggcagacctagagctgtgcccacacagtgtgatgtgcctccaaacagcagatttgactgtgcccctgacaaggccatcacacaagagcagtgtgaagccagaggctgctgttacatccctgccaagcaaggactgcaaggggctcagatgggacagccctggtgcttcttcccaccatcttaccccagctacaagctggaaaacctgagcagctctgagatgggctacactgctacactgaccagaaccacacctacattcttcccaaaggacatcctgacactgaggctggatgtgatgatggaaacagagaacaggctgcacttcaccatcaaggaccctgccaatagaagatatgaggtgcccctggaaacccctcatgtgcactctagagccccatctccactgtactctgtggaattttctgaggaaccctttggggtcatagtcagaaggcagctggatggcagagtgctgctgaacacaactgtggcccctctgttctttgctgatcagttcctgcagctgagcaccagcctgcctagccagtatatcacaggcctggcagagcacctgtctccactgatgctgagcacatcctggaccagaatcaccctgtggaacagagacctggctcccacacctggggccaacctgtatggctctcaccccttctatctggccctggaagatggtggttcagcccatggtgtctttctgctgaactccaatgccatggatgtggtgctgcagccctctcctgctctgtcttggagaagcactggtggcatcctggatgtgtacatctttctgggccctgagcctaagtctgtggtgcagcagtacctggatgttgtgggctaccccttcatgcctccttattggggcctgggcttccacctgtgcagatggggatacagcagcacagccatcaccagacaggttgtggaaaacatgaccagagcacacttcccactggatgtgcagtggaatgacctggactacatggacagcagaagggacttcaccttcaacaaggatggcttcagagacttccctgccatggtgcaagagctgcaccaaggtggtagaagatatatgatgattgtggacccagccatcagctcctctggaccagctggcagctacagaccctatgatgagggactgagaagaggggtgttcatcaccaatgagacaggccagcctctgattggcaaagtgtggccaggctccacagcctttccagatttcacaaaccccacagctctggcttggtgggaagatatggtggcagagttccatgatcaggtgccctttgatggcatgtggattgacatgaatgagcccagcaacttcatcaggggctctgaggatggatgccccaacaatgaactggaaaatcctccttatgtgcctggtgttgttggagggacactgcaggcagccacaatttgtgccagctctcaccagtttctgagcacccactacaacctgcacaatctgtatggcctgactgaggccattgccagccacagggctcttgtgaaggctagaggcaccagaccttttgtgatcagcaggtccacctttgctggccatggcagatatgctggccactggactggggatgtgtggtctagttgggagcagctggctagctctgtgcctgagatcctgcagttcaacctgctgggagtgccccttgttggagcagatgtgtgtggcttcctgggcaacacctcagaggaactgtgtgtcagatggactcagctgggagcattctaccctttcatgagaaaccacaacagcctgctgagcctgcctcaagagccttacagcttttctgagccagcacagcaggccatgagaaaggccctgactctgagatatgccctgctgcctcacctgtacaccctgttccatcaggctcatgtggctggggagactgtggctagacccctgttcctggaattccccaaggacagctccacctggacagtggatcatcagctgctgtggggagaagccctgctgattacacctgtgctgcaggctggcaaggctgaagtgacaggctacttccctcttggcacttggtatgacctgcagacagtgcctgtggaagctctgggatctctgcctccacctcctgctgctcctagagagcctgccattcactctgaaggccagtgggttaccctgcctgctccactggataccatcaatgtgcatctgagagcaggctacatcatccctctgcaaggccctggcctgaccaccacagaatctagacagcagccaatggcactggctgtggccctgaccaaaggtggagaagctagaggggagctgttctgggatgatggggagagcctggaagtgctggaaagaggggcctatacacaagtgatttttctggctaggaacaataccattgtgaatgagcttgtcagagtcacctctgaaggtgctggcctgcagctccagaaagtgacagtgcttggagtggccacagcaccccagcaagtgctgtctaatggggtgccagtgtccaacttcacatacagccctgataccaaggtcctggacatctgtgtgtccctgcttatgggagagcagttcctggtgtcttggtgctaataacctctactgtgccttctagttgccagccatctgttgtttgcccctcccccttgccttccttgaccctggaaggtgccactcccactgtcctttcctaataaaatgaggaaattgcatcacattgtctgagtaggtgtcattctattctggggggtggggtggggcaggacagcaagggggaggattgggaagacaatagcaggcatgctggggatgcagtgggctctatggcttctgaggtggaaagaaccagctggggctctagggggtatcccc

SEQ ID NO: 896 - DNA, 3817 bp, synthetic construct
  source 1..3817: mol_type = other DNA
  misc_feature 1..100: note = mAlb SA
  misc_feature 103..3486: note = 12450 anti-CD63 scFv:GAA
  misc_feature 3493..3768: note = bGH pA
  misc_feature 3769..3817: note = sPA
taggtcagtgaagagaagaacaaaaagcagcatattacagttagttgtcttcatcaatctttaaatatgttgtgtggtttttctctccctgtttccacagttcaggtccagctgcaagagtctggccccaaggtggtcaagccctctgagacactgagcctgacctgcacagtgtctggtggcagcatcagcagctactactggaactggatcagacagagccctggcaaaggcctggaatggattggctacaccaagagaggctacacagactacaaccccagcctgagaagcagagtgaccatctctgaggacaccagcaagaaccagttcagcctgaggatcagctctgtgacagctgctgacacagcagtgtactactgtgcccagatgggctggggcagccatgcctttgatatgtggggccagggcacaatggtggctgtgtccagtgggggctcaggaggaggtggctcaggaggtggaggttcaggaggggagattgtgctgacccagtctcctggcacactgtctctgagccctggggaaagagccacactgagctgtagagccagccagtctgtgtcctctagctacctggcctggtatcagcagaagcctggacaggctcccagactgctgatctatggggcctcttctagagccacaggcatccctgacagattcagtggcagtggctctggcacagacttcaccctgaccatcagcagactggaacctgaggactttgctgtgtactattgccagcagtatggcagcagcccctggacatttggacagggcaccaaggtggaaatcaaaggtggtggtggctctgcccatcctggcagacctagagctgtgcccacacagtgtgatgtgcctccaaacagcagatttgactgtgcccctgacaaggccatcacacaagagcagtgtgaagccagaggctgctgttacatccctgccaagcaaggactgcaaggggctcagatgggacagccctggtgcttcttcccaccatcttaccccagctacaagctggaaaacctgagcagctctgagatgggctacactgctacactgaccagaaccacacctacattcttcccaaaggacatcctgacactgaggctggatgtgatgatggaaacagagaacaggctgcacttcaccatcaaggaccctgccaatagaagatatgaggtgcccctggaaacccctcatgtgcactctagagccccatctccactgtactctgtggaattttctgaggaaccctttggggtcatagtcagaaggcagctggatggcagagtgctgctgaacacaactgtggcccctctgttctttgctgatcagttcctgcagctgagcaccagcctgcctagccagtatatcacaggcctggcagagcacctgtctccactgatgctgagcacatcctggaccagaatcaccctgtggaacagagacctggctcccacacctggggccaacctgtatggctctcaccccttctatctggccctggaagatggtggttcagcccatggtgtctttctgctgaactccaatgccatggatgtggtgctgcagccctctcctgctctgtcttggagaagcactggtggcatcctggatgtgtacatctttctgggccctgagcctaagtctgtggtgcagcagtacctggatgttgtgggctaccccttcatgcctccttattggggcctgggcttccacctgtgcagatggggatacagcagcacagccatcaccagacaggttgtggaaaacatgaccagagcacacttcccactggatgtgcagtggaatgacctggactacatggacagcagaagggacttcaccttcaacaaggatggcttcagagacttccctgccatggtgcaagagctgcaccaaggtggtagaagatatatgatgattgtggacccagccatcagctcctctggaccagctggcagctacagaccctatgatgagggactgagaagaggggtgttcatcaccaatgagacaggccagcctctgattggcaaagtgtggccaggctccacagcctttccagatttcacaaaccccacagctctggcttggtgggaagatatggtggcagagttccatgatcaggtgccctttgatggcatgtggattgacatgaatgagcccagcaacttcatcaggggctctgaggatggatgccccaacaatgaactggaaaatcctccttatgtgcctggtgttgttggagggacactgcaggcagccacaatttgtgccagctctcaccagtttctgagcacccactacaacctgcacaatctgtatggcctgactgaggccattgccagccacagggctcttgtgaaggctagaggcaccagaccttttgtgatcagcaggtccacctttgctggccatggcagatatgctggccactggactggggatgtgtggtctagttgggagcagctggctagctctgtgcctgagatcctgcagttcaacctgctgggagtgccccttgttggagcagatgtgtgtggcttcctgggcaacacctcagaggaactgtgtgtcagatggactcagctgggagcattctaccctttcatgagaaaccacaacagcctgctgagcctgcctcaagagccttacagcttttctgagccagcacagcaggccatgagaaaggccctgactctgagatatgccctgctgcctcacctgtacaccctgttccatcaggctcatgtggctggggagactgtggctagacccctgttcctggaattccccaaggacagctccacctggacagtggatcatcagctgctgtggggagaagccctgctgattacacctgtgctgcaggctggcaaggctgaagtgacaggctacttccctcttggcacttggtatgacctgcagacagtgcctgtggaagctctgggatctctgcctccacctcctgctgctcctagagagcctgccattcactctgaaggccagtgggttaccctgcctgctccactggataccatcaatgtgcatctgagagcaggctacatcatccctctgcaaggccctggcctgaccaccacagaatctagacagcagccaatggcactggctgtggccctgaccaaaggtggagaagctagaggggagctgttctgggatgatggggagagcctggaagtgctggaaagaggggcctatacacaagtgatttttctggctaggaacaataccattgtgaatgagcttgtcagagtcacctctgaaggtgctggcctgcagctccagaaagtgacagtgcttggagtggccacagcaccccagcaagtgctgtctaatggggtgccagtgtccaacttcacatacagccctgataccaaggtcctggacatctgtgtgtccctgcttatgggagagcagttcctggtgtcttggtgctaataacctctactgtgccttctagttgccagccatctgttgtttgcccctcccccttgccttccttgaccctggaaggtgccactcccactgtcctttcctaataaaatgaggaaattgcatcacattgtctgagtaggtgtcattctattctggggggtggggtggggcaggacagcaagggggaggattgggaagacaatagcaggcatgctggggatgcagtgggctctatggcttctgaggtggaaagaaccagctggggctctagggggtatccccaataaaagatctttattttcattagatctgtgtgttggttttttgtgtg

SEQ ID NO: 897 - DNA, 4417 bp, synthetic construct
  source 1..4417: mol_type = other DNA
  misc_feature 1..100: note = mAlb SA
  misc_feature 103..3486: note = 12450 anti-CD63 scFv:GAA
  misc_feature 3493..3768: note = bGH pA
  misc_feature 3769..4368: note = Stuffer
  misc_feature 4369..4417: note = sPA
taggtcagtgaagagaagaacaaaaagcagcatattacagttagttgtcttcatcaatctttaaatatgttgtgtggtttttctctccctgtttccacagttcaggtccagctgcaagagtctggccccaaggtggtcaagccctctgagacactgagcctgacctgcacagtgtctggtggcagcatcagcagctactactggaactggatcagacagagccctggcaaaggcctggaatggattggctacaccaagagaggctacacagactacaaccccagcctgagaagcagagtgaccatctctgaggacaccagcaagaaccagttcagcctgaggatcagctctgtgacagctgctgacacagcagtgtactactgtgcccagatgggctggggcagccatgcctttgatatgtggggccagggcacaatggtggctgtgtccagtgggggctcaggaggaggtggctcaggaggtggaggttcaggaggggagattgtgctgacccagtctcctggcacactgtctctgagccctggggaaagagccacactgagctgtagagccagccagtctgtgtcctctagctacctggcctggtatcagcagaagcctggacaggctcccagactgctgatctatggggcctcttctagagccacaggcatccctgacagattcagtggcagtggctctggcacagacttcaccctgaccatcagcagactggaacctgaggactttgctgtgtactattgccagcagtatggcagcagcccctggacatttggacagggcaccaaggtggaaatcaaaggtggtggtggctctgcccatcctggcagacctagagctgtgcccacacagtgtgatgtgcctccaaacagcagatttgactgtgcccctgacaaggccatcacacaagagcagtgtgaagccagaggctgctgttacatccctgccaagcaaggactgcaaggggctcagatgggacagccctggtgcttcttcccaccatcttaccccagctacaagctggaaaacctgagcagctctgagatgggctacactgctacactgaccagaaccacacctacattcttcccaaaggacatcctgacactgaggctggatgtgatgatggaaacagagaacaggctgcacttcaccatcaaggaccctgccaatagaagatatgaggtgcccctggaaacccctcatgtgcactctagagccccatctccactgtactctgtggaattttctgaggaaccctttggggtcatagtcagaaggcagctggatggcagagtgctgctgaacacaactgtggcccctctgttctttgctgatcagttcctgcagctgagcaccagcctgcctagccagtatatcacaggcctggcagagcacctgtctccactgatgctgagcacatcctggaccagaatcaccctgtggaacagagacctggctcccacacctggggccaacctgtatggctctcaccccttctatctggccctggaagatggtggttcagcccatggtgtctttctgctgaactccaatgccatggatgtggtgctgcagccctctcctgctctgtcttggagaagcactggtggcatcctggatgtgtacatctttctgggccctgagcctaagtctgtggtgcagcagtacctggatgttgtgggctaccccttcatgcctccttattggggcctgggcttccacctgtgcagatggggatacagcagcacagccatcaccagacaggttgtggaaaacatgaccagagcacacttcccactggatgtgcagtggaatgacctggactacatggacagcagaagggacttcaccttcaacaaggatggcttcagagacttccctgccatggtgcaagagctgcaccaaggtggtagaagatatatgatgattgtggacccagccatcagctcctctggaccagctggcagctacagaccctatgatgagggactgagaagaggggtgttcatcaccaatgagacaggccagcctctgattggcaaagtgtggccaggctccacagcctttccagatttcacaaaccccacagctctggcttggtgggaagatatggtggcagagttccatgatcaggtgccctttgatggcatgtggattgacatgaatgagcccagcaacttcatcaggggctctgaggatggatgccccaacaatgaactggaaaatcctccttatgtgcctggtgttgttggagggacactgcaggcagccacaatttgtgccagctctcaccagtttctgagcacccactacaacctgcacaatctgtatggcctgactgaggccattgccagccacagggctcttgtgaaggctagaggcaccagaccttttgtgatcagcaggtccacctttgctggccatggcagatatgctggccactggactggggatgtgtggtctagttgggagcagctggctagctctgtgcctgagatcctgcagttcaacctgctgggagtgccccttgttggagcagatgtgtgtggcttcctgggcaacacctcagaggaactgtgtgtcagatggactcagctgggagcattctaccctttcatgagaaaccacaacagcctgctgagcctgcctcaagagccttacagcttttctgagccagcacagcaggccatgagaaaggccctgactctgagatatgccctgctgcctcacctgtacaccctgttccatcaggctcatgtggctggggagactgtggctagacccctgttcctggaattccccaaggacagctccacctggacagtggatcatcagctgctgtggggagaagccctgctgattacacctgtgctgcaggctggcaaggctgaagtgacaggctacttccctcttggcacttggtatgacctgcagacagtgcctgtggaagctctgggatctctgcctccacctcctgctgctcctagagagcctgccattcactctgaaggccagtgggttaccctgcctgctccactggataccatcaatgtgcatctgagagcaggctacatcatccctctgcaaggccctggcctgaccaccacagaatctagacagcagccaatggcactggctgtggccctgaccaaaggtggagaagctagaggggagctgttctgggatgatggggagagcctggaagtgctggaaagaggggcctatacacaagtgatttttctggctaggaacaataccattgtgaatgagcttgtcagagtcacctctgaaggtgctggcctgcagctccagaaagtgacagtgcttggagtggccacagcaccccagcaagtgctgtctaatggggtgccagtgtccaacttcacatacagccctgataccaaggtcctggacatctgtgtgtccctgcttatgggagagcagttcctggtgtcttggtgctaataacctctactgtgccttctagttgccagccatctgttgtttgcccctcccccttgccttccttgaccctggaaggtgccactcccactgtcctttcctaataaaatgaggaaattgcatcacattgtctgagtaggtgtcattctattctggggggtggggtggggcaggacagcaagggggaggattgggaagacaatagcaggcatgctggggatgcagtgggctctatggcttctgaggtggaaagaaccagctggggctctagggggtatccccaatgtaatagtcacggacattattatcggtctgggatgtcatagtagcttaacggtagcgtgttggaacggtattcggtcacacaaccatgcgacacgtttaagttctgatacagtgcaaagggcttctcatccaattggtctacctgaagactatggtagacatctatgctgccaagttgattttggggtacagtaactgtctaaactagaagatcttttttctaaccagcggcaaaccggttcaggtaaatggtacccgatccgcttgctgctggcgtggccaccgtaaggtgttgtacttgaattggctgaatgacgaatgtgacacggcgagcatctccgattggaggggacacggtgcggcacctacggggtctgaaatttggaccacgatggactctctcgaatgcagacgctcttaatacccaaagatcacggcacgcgacgcttaacttaggttggccatgagtaacttcgcggtctggcggcgccggggttgtcatggttccgtcctgcgatactttcttcaaaagtgtcagccattcgttccacactagctcgatcccacaaccaaagatatagggagggtgattcggacaataaaagatctttattttcattagatctgtgtgttggttttttgtgtg

SEQ ID NO: 898 - DNA, 3897 bp, synthetic construct
  source 1..3897: mol_type = other DNA
  misc_feature 1..100: note = mAlb SA
  misc_feature 103..3486: note = 12450 anti-CD63 scFv:GAA
  misc_feature 3493..3768: note = bGH pA
  misc_feature 3769..3799: note = MAZ
  misc_feature 3800..3830: note = MAZ
  misc_feature 3836..3866: note = MAZ
  misc_feature 3867..3897: note = MAZ
taggtcagtgaagagaagaacaaaaagcagcatattacagttagttgtcttcatcaatctttaaatatgttgtgtggtttttctctccctgtttccacagttcaggtccagctgcaagagtctggccccaaggtggtcaagccctctgagacactgagcctgacctgcacagtgtctggtggcagcatcagcagctactactggaactggatcagacagagccctggcaaaggcctggaatggattggctacaccaagagaggctacacagactacaaccccagcctgagaagcagagtgaccatctctgaggacaccagcaagaaccagttcagcctgaggatcagctctgtgacagctgctgacacagcagtgtactactgtgcccagatgggctggggcagccatgcctttgatatgtggggccagggcacaatggtggctgtgtccagtgggggctcaggaggaggtggctcaggaggtggaggttcaggaggggagattgtgctgacccagtctcctggcacactgtctctgagccctggggaaagagccacactgagctgtagagccagccagtctgtgtcctctagctacctggcctggtatcagcagaagcctggacaggctcccagactgctgatctatggggcctcttctagagccacaggcatccctgacagattcagtggcagtggctctggcacagacttcaccctgaccatcagcagactggaacctgaggactttgctgtgtactattgccagcagtatggcagcagcccctggacatttggacagggcaccaaggtggaaatcaaaggtggtggtggctctgcccatcctggcagacctagagctgtgcccacacagtgtgatgtgcctccaaacagcagatttgactgtgcccctgacaaggccatcacacaagagcagtgtgaagccagaggctgctgttacatccctgccaagcaaggactgcaaggggctcagatgggacagccctggtgcttcttcccaccatcttaccccagctacaagctggaaaacctgagcagctctgagatgggctacactgctacactgaccagaaccacacctacattcttcccaaaggacatcctgacactgaggctggatgtgatgatggaaacagagaacaggctgcacttcaccatcaaggaccctgccaatagaagatatgaggtgcccctggaaacccctcatgtgcactctagagccccatctccactgtactctgtggaattttctgaggaaccctttggggtcatagtcagaaggcagctggatggcagagtgctgctgaacacaactgtggcccctctgttctttgctgatcagttcctgcagctgagcaccagcctgcctagccagtatatcacaggcctggcagagcacctgtctccactgatgctgagcacatcctggaccagaatcaccctgtggaacagagacctggctcccacacctggggccaacctgtatggctctcaccccttctatctggccctggaagatggtggttcagcccatggtgtctttctgctgaactccaatgccatggatgtggtgctgcagccctctcctgctctgtcttggagaagcactggtggcatcctggatgtgtacatctttctgggccctgagcctaagtctgtggtgcagcagtacctggatgttgtgggctaccccttcatgcctccttattggggcctgggcttccacctgtgcagatggggatacagcagcacagccatcaccagacaggttgtggaaaacatgaccagagcacacttcccactggatgtgcagtggaatgacctggactacatggacagcagaagggacttcaccttcaacaaggatggcttcagagacttccctgccatggtgcaagagctgcaccaaggtggtagaagatatatgatgattgtggacccagccatcagctcctctggaccagctggcagctacagaccctatgatgagggactgagaagaggggtgttcatcaccaatgagacaggccagcctctgattggcaaagtgtggccaggctccacagcctttccagatttcacaaaccccacagctctggcttggtgggaagatatggtggcagagttccatgatcaggtgccctttgatggcatgtggattgacatgaatgagcccagcaacttcatcaggggctctgaggatggatgccccaacaatgaactggaaaatcctccttatgtgcctggtgttgttggagggacactgcaggcagccacaatttgtgccagctctcaccagtttctgagcacccactacaacctgcacaatctgtatggcctgactgaggccattgccagccacagggctcttgtgaaggctagaggcaccagaccttttgtgatcagcaggtccacctttgctggccatggcagatatgctggccactggactggggatgtgtggtctagttgggagcagctggctagctctgtgcctgagatcctgcagttcaacctgctgggagtgccccttgttggagcagatgtgtgtggcttcctgggcaacacctcagaggaactgtgtgtcagatggactcagctgggagcattctaccctttcatgagaaaccacaacagcctgctgagcctgcctcaagagccttacagcttttctgagccagcacagcaggccatgagaaaggccctgactctgagatatgccctgctgcctcacctgtacaccctgttccatcaggctcatgtggctggggagactgtggctagacccctgttcctggaattccccaaggacagctccacctggacagtggatcatcagctgctgtggggagaagccctgctgattacacctgtgctgcaggctggcaaggctgaagtgacaggctacttccctcttggcacttggtatgacctgcagacagtgcctgtggaagctctgggatctctgcctccacctcctgctgctcctagagagcctgccattcactctgaaggccagtgggttaccctgcctgctccactggataccatcaatgtgcatctgagagcaggctacatcatccctctgcaaggccctggcctgaccaccacagaatctagacagcagccaatggcactggctgtggccctgaccaaaggtggagaagctagaggggagctgttctgggatgatggggagagcctggaagtgctggaaagaggggcctatacacaagtgatttttctggctaggaacaataccattgtgaatgagcttgtcagagtcacctctgaaggtgctggcctgcagctccagaaagtgacagtgcttggagtggccacagcaccccagcaagtgctgtctaatggggtgccagtgtccaacttcacatacagccctgataccaaggtcctggacatctgtgtgtccctgcttatgggagagcagttcctggtgtcttggtgctaataacctctactgtgccttctagttgccagccatctgttgtttgcccctcccccttgccttccttgaccctggaaggtgccactcccactgtcctttcctaataaaatgaggaaattgcatcacattgtctgagtaggtgtcattctattctggggggtggggtggggcaggacagcaagggggaggattgggaagacaatagcaggcatgctggggatgcagtgggctctatggcttctgaggtggaaagaaccagctggggctctagggggtatccccctggccttgggggagggggaggccagaatgactggccttgggggagggggaggccagaatgagttgactggccttgggggagggggaggccagaatgactggccttgggggagggggaggccagaatga

SEQ ID NO: 899 - DNA, 3848 bp, synthetic construct
  source 1..3848: mol_type = other DNA
  misc_feature 1..100: note = mAlb SA
  misc_feature 103..3486: note = 12450 anti-CD63 scFv:GAA
  misc_feature 3493..3719: note = SV40 polyA
  misc_feature 3720..3750: note = MAZ
  misc_feature 3751..3781: note = MAZ
  misc_feature 3787..3817: note = MAZ
  misc_feature 3818..3848: note = MAZ
taggtcagtgaagagaagaacaaaaagcagcatattacagttagttgtcttcatcaatctttaaatatgttgtgtggtttttctctccctgtttccacagttcaggtccagctgcaagagtctggccccaaggtggtcaagccctctgagacactgagcctgacctgcacagtgtctggtggcagcatcagcagctactactggaactggatcagacagagccctggcaaaggcctggaatggattggctacaccaagagaggctacacagactacaaccccagcctgagaagcagagtgaccatctctgaggacaccagcaagaaccagttcagcctgaggatcagctctgtgacagctgctgacacagcagtgtactactgtgcccagatgggctggggcagccatgcctttgatatgtggggccagggcacaatggtggctgtgtccagtgggggctcaggaggaggtggctcaggaggtggaggttcaggaggggagattgtgctgacccagtctcctggcacactgtctctgagccctggggaaagagccacactgagctgtagagccagccagtctgtgtcctctagctacctggcctggtatcagcagaagcctggacaggctcccagactgctgatctatggggcctcttctagagccacaggcatccctgacagattcagtggcagtggctctggcacagacttcaccctgaccatcagcagactggaacctgaggactttgctgtgtactattgccagcagtatggcagcagcccctggacatttggacagggcaccaaggtggaaatcaaaggtggtggtggctctgcccatcctggcagacctagagctgtgcccacacagtgtgatgtgcctccaaacagcagatttgactgtgcccctgacaaggccatcacacaagagcagtgtgaagccagaggctgctgttacatccctgccaagcaaggactgcaaggggctcagatgggacagccctggtgcttcttcccaccatcttaccccagctacaagctggaaaacctgagcagctctgagatgggctacactgctacactgaccagaaccacacctacattcttcccaaaggacatcctgacactgaggctggatgtgatgatggaaacagagaacaggctgcacttcaccatcaaggaccctgccaatagaagatatgaggtgcccctggaaacccctcatgtgcactctagagccccatctccactgtactctgtggaattttctgaggaaccctttggggtcatagtcagaaggcagctggatggcagagtgctgctgaacacaactgtggcccctctgttctttgctgatcagttcctgcagctgagcaccagcctgcctagccagtatatcacaggcctggcagagcacctgtctccactgatgctgagcacatcctggaccagaatcaccctgtggaacagagacctggctcccacacctggggccaacctgtatggctctcaccccttctatctggccctggaagatggtggttcagcccatggtgtctttctgctgaactccaatgccatggatgtggtgctgcagccctctcctgctctgtcttggagaagcactggtggcatcctggatgtgtacatctttctgggccctgagcctaagtctgtggtgcagcagtacctggatgttgtgggctaccccttcatgcctccttattggggcctgggcttccacctgtgcagatggggatacagcagcacagccatcaccagacaggttgtggaaaacatgaccagagcacacttcccactggatgtgcagtggaatgacctggactacatggacagcagaagggacttcaccttcaacaaggatggcttcagagacttccctgccatggtgcaagagctgcaccaaggtggtagaagatatatgatgattgtggacccagccatcagctcctctggaccagctggcagctacagaccctatgatgagggactgagaagaggggtgttcatcaccaatgagacaggccagcctctgattggcaaagtgtggccaggctccacagcctttccagatttcacaaaccccacagctctggcttggtgggaagatatggtggcagagttccatgatcaggtgccctttgatggcatgtggattgacatgaatgagcccagcaacttcatcaggggctctgaggatggatgccccaacaatgaactggaaaatcctccttatgtgcctggtgttgttggagggacactgcaggcagccacaatttgtgccagctctcaccagtttctgagcacccactacaacctgcacaatctgtatggcctgactgaggccattgccagccacagggctcttgtgaaggctagaggcaccagaccttttgtgatcagcaggtccacctttgctggccatggcagatatgctggccactggactggggatgtgtggtctagttgggagcagctggctagctctgtgcctgagatcctgcagttcaacctgctgggagtgccccttgttggagcagatgtgtgtggcttcctgggcaacacctcagaggaactgtgtgtcagatggactcagctgggagcattctaccctttcatgagaaaccacaacagcctgctgagcctgcctcaagagccttacagcttttctgagccagcacagcaggccatgagaaaggccctgactctgagatatgccctgctgcctcacctgtacaccctgttccatcaggctcatgtggctggggagactgtggctagacccctgttcctggaattccccaaggacagctccacctggacagtggatcatcagctgctgtggggagaagccctgctgattacacctgtgctgcaggctggcaaggctgaagtgacaggctacttccctcttggcacttggtatgacctgcagacagtgcctgtggaagctctgggatctctgcctccacctcctgctgctcctagagagcctgccattcactctgaaggccagtgggttaccctgcctgctccactggataccatcaatgtgcatctgagagcaggctacatcatccctctgcaaggccctggcctgaccaccacagaatctagacagcagccaatggcactggctgtggccctgaccaaaggtggagaagctagaggggagctgttctgggatgatggggagagcctggaagtgctggaaagaggggcctatacacaagtgatttttctggctaggaacaataccattgtgaatgagcttgtcagagtcacctctgaaggtgctggcctgcagctccagaaagtgacagtgcttggagtggccacagcaccccagcaagtgctgtctaatggggtgccagtgtccaacttcacatacagccctgataccaaggtcctggacatctgtgtgtccctgcttatgggagagcagttcctggtgtcttggtgctaataatcagccataccacatttgtagaggttttacttgctttaaaaaacctcccacacctccccctgaacctgaaacataaaatgaatgcaattgttgttgttaacttgtttattgcagcttataatggttacaaataaagcaatagcatcacaaatttcacaaataaagcatttttttcactgcattctagttgtggtttgtccaaactcatcaatgtatcttatcatgtcctggccttgggggagggggaggccagaatgactggccttgggggagggggaggccagaatgagttgactggccttgggggagggggaggccagaatgactggccttgggggagggggaggccagaatga

SEQ ID NO: 900 - DNA, 3996 bp, synthetic construct
  source 1..3996: mol_type = other DNA
  misc_feature 1..100: note = mAlb SA
  misc_feature 103..3486: note = 12450 anti-CD63 scFv:GAA
  misc_feature 3493..3768: note = bGH pA
  misc_feature 3770..3996: note = SV40 late polyA
taggtcagtgaagagaagaacaaaaagcagcatattacagttagttgtcttcatcaatctttaaatatgttgtgtggtttttctctccctgtttccacagttcaagtccagctgcaagagtctggccccaaggtggtcaagccctctgagacactgagcctgacctgcacagtgtctggtggcagcatcagcagctactactggaactggatcagacagagccctggcaaaggactggaatggattggctacaccaagagaggctacacagactacaaccccagcctgagaagcagagtgaccatctctgaggacaccagcaagaaccagttcagcctgaggatcagctctgtgacagctgctgacacagcagtttactactgtgcccagatgggctggggcagccatgcctttgatatgtggggccagggcacaatggtggctgtgtccagtgggggctcaggaggaggtggctcaggaggtggaggttcaggaggggagattgtgctgacccagtctcctggcacactgtctctgagccctggggaaagagccacactgagctgtagagccagccagtctgtgtcctctagctacctggcctggtatcagcagaagcctggacaggctcccagactgctgatctatggggcctcttctagagccacaggcatccctgacagattcagtggcagtggctctggcacagacttcaccctgaccatcagcagactggaacctgaggactttgctgtgtactattgccagcagtatggcagcagcccctggacatttggacagggcaccaaggtggaaatcaaagggggtggtggctctgcccatcctggcagacctagagctgtgcccacacagtgtgatgtgcctccaaacagcagatttgactgtgcccctgacaaggccatcacacaagagcagtgtgaagccagaggctgctgttacatccctgccaagcaaggactgcaaggggctcagatgggacagccctggtgcttcttcccaccatcttaccccagctacaagctggaaaacctgagcagctctgagatgggctacactgctacactgaccagaaccacacctacattcttcccaaaggacatcctgacactgaggctggatgtgatgatggaaacagagaacaggctgcacttcaccatcaaggaccctgccaatagaagatatgaggtgcccctggaaacccctcatgtgcactctagagccccatctccactgtactctgtggaattttctgaggaaccctttggggtcatagtcagaaggcagctggatggcagagtgctgctgaacacaactgtggcccctctgttctttgctgatcagttcctgcagctgagcaccagcctgcctagccagtatatcacaggcctggcagagcacctgtctccactgatgctgagcacatcctggaccagaatcaccctgtggaacagagacctggctcccacacctggggccaacctgtatggctctcaccccttctatctggccctggaagatggtggttcagcccatggtgtctttctgctgaactccaatgccatggatgtggtgctgcagccctctcctgctctgtcttggagaagcactggtggcatcctggatgtgtacatctttctgggccctgagcctaagtctgtggtgcagcagtacctggatgttgtgggctaccccttcatgcctccttattggggcctgggcttccacctgtgcagatggggatacagcagcacagccatcaccagacaggttgtggaaaacatgaccagagcacacttcccactggatgtgcagtggaatgacctggactacatggacagcagaagggacttcaccttcaacaaggatggcttcagagacttccctgccatggtgcaagagctgcaccaagggggcagaagatatatgatgattgtggacccagccatcagctcctctggaccagctggcagctacagaccctatgatgagggactgagaagaggggtgttcatcaccaatgagacaggccagcctctgattggcaaagtgtggccaggctccacagcctttccagatttcacaaaccccacagctctggcttggtgggaagatatggtggcagagttccatgatcaggtgccctttgatggcatgtggattgacatgaatgagcccagcaacttcatcaggggctctgaggatggatgccccaacaatgaactggaaaatcctccttatgtgcctggtgttgttggagggacactgcaggcagccacaatttgtgccagctctcaccagtttctgagcacccactacaacctgcacaatctgtatggcctgactgaggccattgccagccacagggctcttgtgaaggctagaggcaccagaccttttgtgatcagcaggtccacctttgctggccatggcagatatgctggccactggactggggatgtgtggtctagttgggagcagctggctagctctgtgcctgagatcctgcagttcaacctgctgggagtgccccttgttggagcagatgtgtgtggcttcctgggcaacacctcagaggaactgtgtgtcagatggactcagctgggagcattctaccctttcatgagaaaccacaacagcctgctgagcctgcctcaagagccttacagcttttctgagccagcacagcaggccatgagaaaggccctgactctgagatatgccctgctgcctcacctgtacaccctgttccatcaggctcatgtggctggggagactgtggctagacccctgttcctggaattccccaaggacagctccacctggacagtggatcatcagctgctgtggggagaagccctgctgattacacctgtgctgcaggctggcaaggctgaagtgacaggctacttccctcttggcacttggtatgacctgcagacagtgcctgtggaagctctgggatctctgcctccacctcctgctgctcctagagagcctgccattcactctgaaggccagtgggttaccctgcctgctccactggataccatcaatgtgcatctgagagcaggctacatcatccctctgcaaggccctggcctgaccaccacagaatctagacagcagccaatggcactggctgtggccctgaccaaagggggagaagctagaggggagctgttctgggatgatggggagagcctggaagtgctggaaagaggggcctatacacaagtgatttttctggctaggaacaataccattgtgaatgagcttgtcagagtcacctctgaaggtgctggcctgcagctccagaaagtgacagtgcttggagtggccacagcaccccagcaagtgctgtctaatggggtgccagtgtccaacttcacatacagccctgataccaaggtcctggacatctgtgtgtccctgcttatgggagagcagttcctggtgtcttggtgctaataacctctactgtgccttctagttgccagccatctgttgtttgcccctcccccttgccttccttgaccctggaaggtgccactcccactgtcctttcctaataaaatgaggaaattgcatcacattgtctgagtaggtgtcattctattctggggggtggggtggggcaggacagcaagggggaggattgggaagacaatagcaggcatgctggggatgcagtgggctctatggcttctgaggtggaaagaaccagctggggctctagggggtatccccagacatgataagatacattgatgagtttggacaaaccacaactagaatgcagtgaaaaaaatgcttgatttgtgaaatttgtgatgctattgcttgatttgtaaccattataagctgcaataaacaagttaacaacaacaattgcattcattttatgtttcaggttcagggggaggtgtgggaggttttttaaagcaagtaaaacctctacaaatgtggtatggctga

SEQ ID NO: 901 - DNA, 3768 bp, synthetic construct
  source 1..3768: mol_type = other DNA
  misc_feature 1..100: note = mAlb SA
  misc_feature 103..3486: note = 12450 anti-CD63 scFv:GAA
  misc_feature 3493..3768: note = bGH pA
taggtcagtgaagagaagaacaaaaagcagcatattacagttagttgtcttcatcaatctttaaatatgttgtgtggtttttctctccctgtttccacagttcaagtccagctgcaagagtctggccccaaggtggtcaagccctctgagacactgagcctgacctgcacagtgtctggtggcagcatcagcagctactactggaactggatcagacagagccctggcaaaggactggaatggattggctacaccaagagaggctacacagactacaaccccagcctgagaagcagagtgaccatctctgaggacaccagcaagaaccagttcagcctgaggatcagctctgtgacagctgctgacacagcagtttactactgtgcccagatgggctggggcagccatgcctttgatatgtggggccagggcacaatggtggctgtgtccagtgggggctcaggaggaggtggctcaggaggtggaggttcaggaggggagattgtgctgacccagtctcctggcacactgtctctgagccctggggaaagagccacactgagctgtagagccagccagtctgtgtcctctagctacctggcctggtatcagcagaagcctggacaggctcccagactgctgatctatggggcctcttctagagccacaggcatccctgacagattcagtggcagtggctctggcacagacttcaccctgaccatcagcagactggaacctgaggactttgctgtgtactattgccagcagtatggcagcagcccctggacatttggacagggcaccaaggtggaaatcaaagggggtggtggctctgcccatcctggcagacctagagctgtgcccacacagtgtgatgtgcctccaaacagcagatttgactgtgcccctgacaaggccatcacacaagagcagtgtgaagccagaggctgctgttacatccctgccaagcaaggactgcaaggggctcagatgggacagccctggtgcttcttcccaccatcttaccccagctacaagctggaaaacctgagcagctctgagatgggctacactgctacactgaccagaaccacacctacattcttcccaaaggacatcctgacactgaggctggatgtgatgatggaaacagagaacaggctgcacttcaccatcaaggaccctgccaatagaagatatgaggtgcccctggaaacccctcatgtgcactctagagccccatctccactgtactctgtggaattttctgaggaaccctttggggtcatagtcagaaggcagctggatggcagagtgctgctgaacacaactgtggcccctctgttctttgctgatcagttcctgcagctgagcaccagcctgcctagccagtatatcacaggcctggcagagcacctgtctccactgatgctgagcacatcctggaccagaatcaccctgtggaacagagacctggctcccacacctggggccaacctgtatggctctcaccccttctatctggccctggaagatggtggttcagcccatggtgtctttctgctgaactccaatgccatggatgtggtgctgcagccctctcctgctctgtcttggagaagcactggtggcatcctggatgtgtacatctttctgggccctgagcctaagtctgtggtgcagcagtacctggatgttgtgggctaccccttcatgcctccttattggggcctgggcttccacctgtgcagatggggatacagcagcacagccatcaccagacaggttgtggaaaacatgaccagagcacacttcccactggatgtgcagtggaatgacctggactacatggacagcagaagggacttcaccttcaacaaggatggcttcagagacttccctgccatggtgcaagagctgcaccaagggggcagaagatatatgatgattgtggacccagccatcagctcctctggaccagctggcagctacagaccctatgatgagggactgagaagaggggtgttcatcaccaatgagacaggccagcctctgattggcaaagtgtggccaggctccacagcctttccagatttcacaaaccccacagctctggcttggtgggaagatatggtggcagagttccatgatcaggtgccctttgatggcatgtggattgacatgaatgagcccagcaacttcatcaggggctctgaggatggatgccccaacaatgaactggaaaatcctccttatgtgcctggtgttgttggagggacactgcaggcagccacaatttgtgccagctctcaccagtttctgagcacccactacaacctgcacaatctgtatggcctgactgaggccattgccagccacagggctcttgtgaaggctagaggcaccagaccttttgtgatcagcaggtccacctttgctggccatggcagatatgctggccactggactggggatgtgtggtctagttgggagcagctggctagctctgtgcctgagatcctgcagttcaacctgctgggagtgccccttgttggagcagatgtgtgtggcttcctgggcaacacctcagaggaactgtgtgtcagatggactcagctgggagcattctaccctttcatgagaaaccacaacagcctgctgagcctgcctcaagagccttacagcttttctgagccagcacagcaggccatgagaaaggccctgactctgagatatgccctgctgcctcacctgtacaccctgttccatcaggctcatgtggctggggagactgtggctagacccctgttcctggaattccccaaggacagctccacctggacagtggatcatcagctgctgtggggagaagccctgctgattacacctgtgctgcaggctggcaaggctgaagtgacaggctacttccctcttggcacttggtatgacctgcagacagtgcctgtggaagctctgggatctctgcctccacctcctgctgctcctagagagcctgccattcactctgaaggccagtgggttaccctgcctgctccactggataccatcaatgtgcatctgagagcaggctacatcatccctctgcaaggccctggcctgaccaccacagaatctagacagcagccaatggcactggctgtggccctgaccaaagggggagaagctagaggggagctgttctgggatgatggggagagcctggaagtgctggaaagaggggcctatacacaagtgatttttctggctaggaacaataccattgtgaatgagcttgtcagagtcacctctgaaggtgctggcctgcagctccagaaagtgacagtgcttggagtggccacagcaccccagcaagtgctgtctaatggggtgccagtgtccaacttcacatacagccctgataccaaggtcctggacatctgtgtgtccctgcttatgggagagcagttcctggtgtcttggtgctaataacctctactgtgccttctagttgccagccatctgttgtttgcccctcccccttgccttccttgaccctggaaggtgccactcccactgtcctttcctaataaaatgaggaaattgcatcacattgtctgagtaggtgtcattctattctggggggtggggtggggcaggacagcaagggggaggattgggaagacaatagcaggcatgctggggatgcagtgggctctatggcttctgaggtggaaagaaccagctggggctctagggggtatcccc

SEQ ID NO: 902 - DNA, 504 bp, synthetic construct
  source 1..504: mol_type = other DNA
cctctactgtgccttctagttgccagccatctgttgtttgcccctcccccttgccttccttgaccctggaaggtgccactcccactgtcctttcctaataaaatgaggaaattgcatcacattgtctgagtaggtgtcattctattctggggggtggggtggggcaggacagcaagggggaggattgggaagacaatagcaggcatgctggggatgcagtgggctctatggcttctgaggtggaaagaaccagctggggctctagggggtatccccagacatgataagatacattgatgagtttggacaaaccacaactagaatgcagtgaaaaaaatgcttgatttgtgaaatttgtgatgctattgcttgatttgtaaccattataagctgcaataaacaagttaacaacaacaattgcattcattttatgtttcaggttcagggggaggtgtgggaggttttttaaagcaagtaaaacctctacaaatgtggtatggctga

1. A method of inserting a nucleic acid encoding a polypeptide of interest into a target genomic locus in a cell or a population of cells in a subject, comprising administering to the subject:
(a) a nucleic acid construct comprising a coding sequence for the polypeptide of interest;
(b) a nuclease agent or one or more nucleic acids encoding the nuclease agent, wherein the nuclease agent targets a nuclease target site in the target genomic locus; and
(c) an effective amount of a plasma cell depleting agent,
wherein the subject has preexisting immunity to the nucleic acid construct, the polypeptide of interest, the nuclease agent, the one or more nucleic acids encoding the nuclease agent, or a delivery vehicle for the nucleic acid construct, the nuclease agent, or the one or more nucleic acids encoding the nuclease agent, and
wherein the nuclease agent cleaves the nuclease target site, and the nucleic acid construct is inserted into the target genomic locus.

2. A method of expressing a polypeptide of interest from a target genomic locus in a cell or a population of cells in a subject, comprising administering to the subject:
(a) a nucleic acid construct comprising a coding sequence for the polypeptide of interest;
(b) a nuclease agent or one or more nucleic acids encoding the nuclease agent, wherein the nuclease agent targets a nuclease target site in the target genomic locus; and
(c) an effective amount of a plasma cell depleting agent,
wherein the subject has preexisting immunity to the nucleic acid construct, the polypeptide of interest, the nuclease agent, the one or more nucleic acids encoding the nuclease agent, or a delivery vehicle for the nucleic acid construct, the nuclease agent, or the one or more nucleic acids encoding the nuclease agent, and
wherein the nuclease agent cleaves the nuclease target site, the nucleic acid construct is inserted into the target genomic locus to create a modified target genomic locus, and the polypeptide of interest is expressed from the modified target genomic locus.

3. A method of treating an enzyme deficiency in a subject in need thereof, comprising administering to the subject:
(a) a nucleic acid construct comprising a coding sequence for a polypeptide of interest, wherein the polypeptide of interest comprises an enzyme to treat the enzyme deficiency;
(b) a nuclease agent or one or more nucleic acids encoding the nuclease agent, wherein the nuclease agent targets a nuclease target site in a target genomic locus; and
(c) an effective amount of a plasma cell depleting agent,
wherein the subject has preexisting immunity to the nucleic acid construct, the polypeptide of interest, the nuclease agent, the one or more nucleic acids encoding the nuclease agent, or a delivery vehicle for the nucleic acid construct, the nuclease agent, or the one or more nucleic acids encoding the nuclease agent, and
wherein the nuclease agent cleaves the nuclease target site, the nucleic acid construct is inserted into the target genomic locus to create a modified target genomic locus, and the polypeptide of interest is expressed from the modified target genomic locus, thereby treating the enzyme deficiency.

4. A method of preventing or reducing the onset of a sign or symptom of an enzyme deficiency in a subject in need thereof, comprising administering to the subject:
(a) a nucleic acid construct comprising a coding sequence for a polypeptide of interest, wherein the enzyme deficiency is characterized by a loss-of-function of the polypeptide of interest;
(b) a nuclease agent or one or more nucleic acids encoding the nuclease agent, wherein the nuclease agent targets a nuclease target site in a target genomic locus; and
(c) an effective amount of a plasma cell depleting agent,
wherein the subject has preexisting immunity to the nucleic acid construct, the polypeptide of interest, the nuclease agent, the one or more nucleic acids encoding the nuclease agent, or a delivery vehicle for the nucleic acid construct, the nuclease agent, or the one or more nucleic acids encoding the nuclease agent, and
wherein the nuclease agent cleaves the nuclease target site, the nucleic acid construct is inserted into the target genomic locus to create a modified target genomic locus, and the polypeptide of interest is expressed from the modified target genomic locus, thereby preventing or reducing the onset of the sign or symptom of the enzyme deficiency.

5.-131. (canceled)

132. A composition or combination comprising an effective amount of a plasma cell depleting agent in combination with: (a) a nucleic acid construct comprising a coding sequence for the polypeptide of interest; and (b) a nuclease agent or one or more nucleic acids encoding the nuclease agent, wherein the nuclease agent targets a nuclease target site in a target genomic locus.

133.-233. (canceled)

234. A kit comprising the composition or combination of claim 132.

235. (canceled)

236. A method of inserting a nucleic acid encoding a polypeptide of interest into a target genomic locus in a cell or a population of cells in a subject, comprising administering to the subject:
(a) a nucleic acid construct comprising a coding sequence for the polypeptide of interest;
(b) a nuclease agent or one or more nucleic acids encoding the nuclease agent, wherein the nuclease agent targets a nuclease target site in the target genomic locus; and
(c) an effective amount of an anti-CD20×CD3 bispecific antibody or functional fragment thereof,
wherein the subject does not have preexisting immunity to the nucleic acid construct, the polypeptide of interest, the nuclease agent, the one or more nucleic acids encoding the nuclease agent, or a delivery vehicle for the nucleic acid construct, the nuclease agent, or the one or more nucleic acids encoding the nuclease agent, and
wherein the nuclease agent cleaves the nuclease target site, and the nucleic acid construct is inserted into the target genomic locus.

237. A method of expressing a polypeptide of interest from a target genomic locus in a cell or a population of cells in a subject, comprising administering to the subject:
(a) a nucleic acid construct comprising a coding sequence for the polypeptide of interest;
(b) a nuclease agent or one or more nucleic acids encoding the nuclease agent, wherein the nuclease agent targets a nuclease target site in the target genomic locus; and
(c) an effective amount of an anti-CD20×CD3 bispecific antibody or functional fragment thereof,
wherein the subject does not have preexisting immunity to the nucleic acid construct, the polypeptide of interest, the nuclease agent, the one or more nucleic acids encoding the nuclease agent, or a delivery vehicle for the nucleic acid construct, the nuclease agent, or the one or more nucleic acids encoding the nuclease agent, and
wherein the nuclease agent cleaves the nuclease target site, the nucleic acid construct is inserted into the target genomic locus to create a modified target genomic locus, and the polypeptide of interest is expressed from the modified target genomic locus.

238. A method of treating an enzyme deficiency in a subject in need thereof, comprising administering to the subject:
(a) a nucleic acid construct comprising a coding sequence for a polypeptide of interest, wherein the polypeptide of interest comprises an enzyme to treat the enzyme deficiency;
(b) a nuclease agent or one or more nucleic acids encoding the nuclease agent, wherein the nuclease agent targets a nuclease target site in a target genomic locus; and
(c) an effective amount of an anti-CD20×CD3 bispecific antibody or functional fragment thereof,
wherein the subject does not have preexisting immunity to the nucleic acid construct, the polypeptide of interest, the nuclease agent, the one or more nucleic acids encoding the nuclease agent, or a delivery vehicle for the nucleic acid construct, the nuclease agent, or the one or more nucleic acids encoding the nuclease agent, and
wherein the nuclease agent cleaves the nuclease target site, the nucleic acid construct is inserted into the target genomic locus to create a modified target genomic locus, and the polypeptide of interest is expressed from the modified target genomic locus, thereby treating the enzyme deficiency.

239. A method of preventing or reducing the onset of a sign or symptom of an enzyme deficiency in a subject in need thereof, comprising administering to the subject:
(a) a nucleic acid construct comprising a coding sequence for a polypeptide of interest, wherein the enzyme deficiency is characterized by a loss-of-function of the polypeptide of interest;
(b) a nuclease agent or one or more nucleic acids encoding the nuclease agent, wherein the nuclease agent targets a nuclease target site in a target genomic locus; and
(c) an effective amount of an anti-CD20×CD3 bispecific antibody or functional fragment thereof,
wherein the subject does not have preexisting immunity to the nucleic acid construct, the polypeptide of interest, the nuclease agent, the one or more nucleic acids encoding the nuclease agent, or a delivery vehicle for the nucleic acid construct, the nuclease agent, or the one or more nucleic acids encoding the nuclease agent, and
wherein the nuclease agent cleaves the nuclease target site, the nucleic acid construct is inserted into the target genomic locus to create a modified target genomic locus, and the polypeptide of interest is expressed from the modified target genomic locus, thereby preventing or reducing the onset of the sign or symptom of the enzyme deficiency.

240.-332. (canceled)

333. A composition or combination comprising an effective amount of an anti-CD20×CD3 bispecific antibody or functional fragment thereof in combination with: (a) a nucleic acid construct comprising a coding sequence for the polypeptide of interest; and (b) a nuclease agent or one or more nucleic acids encoding the nuclease agent, wherein the nuclease agent targets a nuclease target site in a target genomic locus.

334.-407. (canceled)

408. A kit comprising the composition or combination of claim 333.

409. (canceled)
